(19) United States
(12) Patent Application Publication
(10) Pub. No.: US 2004/0259175 A1
(43) Pub. Date: Dec. 23, 2004

(54) Human prostate cancer candidate protein 1

(76) Inventor: Jinjiao Guo, San Jose, CA (US)

Correspondence Address: AMERSHAM BIOSCIENCES, PATENT DEPARTMENT, 800 CENTENNIAL AVENUE, PISCATAWAY, NJ, 08855, US

(21) Appl. No.: 10/498,462

(22) PCT Filed: Nov. 22, 2002
(86) PCT No.: PCT/US02/37506

Related U.S. Application Data
(60) Provisional application No. 60/339,764, filed on Dec. 10, 2001.

(51) Int. Cl. G01N 33/574; C07H 21/04; C07K 14/705

(52) U.S. Cl. 435/7.23; 530/350; 536/23.5; 435/69.1; 435/320.1; 435/325

(57) ABSTRACT

The invention provides isolated nucleic acids that encode prostate cancer candidate protein 1 (PCCP1), and fragments thereof, vectors for propagating and expressing PCCP1 nucleic acids, host cells comprising the nucleic acids and vectors of the present invention, proteins, protein fragments, and protein fusions of the novel PCCP1 isoforms, and antibodies thereto. The invention further provides transgenic cells and non-human organisms comprising human PCCP1 nucleic acids, and transgenic cells and non-human organisms with targeted disruption of the endogenous orthologue of the human PCCP1 gene. The invention further provides pharmaceutical formulations of the nucleic acids, proteins, and antibodies of the present invention, and diagnostic, investigational, and therapeutic methods based on the PCCP1 nucleic acids, proteins, and antibodies of the present invention.

### CROSS REFERENCE TO RELATED APPLICATIONS

[0001] This application claims priority under 35 U.S.C. § 120 to U.S. provisional application Ser. No. 60/339,764, filed Dec. 10, 2001; the disclosure of which is incorporated herein by reference in its entireties.

### REFERENCE TO SEQUENCE LISTING SUBMITTED ON COMPACT DISC

[0002] The present application includes a Sequence Listing filed on a single CD-R disc, provided in duplicate, containing a single file named pto_PB01102.txt, having 481 kilobytes, last modified on Nov. 6, 2002 and recorded Nov. 6, 2002. The Sequence Listing contained in said file on said disc is incorporated herein by reference in its entirety.

### FIELD OF THE INVENTION

[0003] The present invention relates to novel human prostate cancer candidate protein 1 (PCCP1). More specifically, the invention provides isolated nucleic acid molecules encoding PCCP1, fragments thereof, vectors and host cells comprising isolated nucleic acid molecules encoding PCCP1, PCCP1 polypeptides, antibodies, transgenic cells and non-human organisms, and diagnostic, therapeutic, and investigational methods of using the same.

### BACKGROUND OF THE INVENTION

[0004] Prostate cancer is the most common solid tumor and the second leading cause of cancer deaths among men in the United States. Landis et al., CA Cancer J. Clin. 49:8-31 (1999). The prevalence of prostate cancer varies worldwide with the highest frequency found in African Americans and the lowest frequency found in Asian populations. Parkin et al., Int. J. Cancer 54:594-606 (1993). In the year 2000, around 180,400 men were diagnosed with prostate cancer, and among them around 31,900 will die of the disease. Many risk factors for human prostate cancer have been proposed, including genetic predisposition (Paris et al., Cancer Research 60:3645-3649 (2000)), age, diet, hormone, and environmental factors (Whittemore et al., J. Natl. Cancer Inst. 87:652-661 (1995)). However, the molecular pathogenesis of this disease remains poorly understood. Epidemiological data suggest that 9% of all the prostate cancers occurring by age 85 are the result of a hereditary predisposition and this frequency rises to 43% in early-onset (age 55 or younger) prostate cancer cases. Carter et al., Proc. Natl. Acad. Sci. USA, 89:3367-3371 (1992). Therefore, mapping the hereditary prostate cancer susceptibility loci become important in terms of searching for genes that are involved in prostate cancer.

[0005] Genetic studies of prostate cancer families published to date have reported positive linkages of prostate cancer with chromosomes 1p, 1q, 2q, 12p, 15q, 16p and X. Suarez et al., Am. J. Hum. Genet. 66:933-944 (2000). The strongest association was found within chromosome 16q23 region. Deletions of 16q have been found in prostate cancer, and the literatures suggest that this region may contain tumor suppressor loci. Cher et al., J. Urol. 153:249-254 (1995). Loss of hereozygosity (LOH) on 16q has also been found in other cancers, including breast cancer (Chen et al., Cancer Res. 56:5605-5609 (1996)) and hepatocellular carcinoma (Piao et al., Br. J. Cancer 80:850-854, (1999)). All the data suggest that one or more genes within 16q23 may be implicated in the development of prostate cancer and other malignancies. In recent years, an increasing number of inherited diseases in man have been identified in which there is an impairment in one or more peroxisomal functions. Wanders et al., Ann. N.Y. Acad. Sci. 804:450-60 (1996). In prostate cancer cells, the peroxisomal functions may be disrupted due to the LOH of 16q23 region which leads to prostate cancer.

[0006] The chromo domain is a highly conserved sequence motif that has been identified in a variety of animal and plant species. Jones et al., BioEssays 22:124-137 (2000). In mammals, chromo domain proteins appear to be either structural components of large macromolecular chromatin complexes or proteins involved in remodelling chromatin structure. Recent work has suggested that apart from a role in regulating gene activity, chromo domain proteins may also play roles in genome organisation.

[0007] Given the fact that chromosome 16q23 is strongly associated with genetic predisposition of prostate cancer, it is important to conduct searches to identify genes within chromosome 16q23 which are candidates for prostate cancer.

### SUMMARY OF THE INVENTION

[0008] The present invention solves these and other needs in the art by providing isolated nucleic acids that encode prostate cancer candidate protein 1 (PCCP1), and fragments thereof.

[0009] In other aspects, the invention provides vectors for propagating and expressing the nucleic acids of the present invention, host cells comprising the nucleic acids and vectors of the present invention, proteins, protein fragments, and protein fusions of the PCCP1, and antibodies thereto.

[0010] The invention further provides pharmaceutical formulations of the nucleic acids, proteins, and antibodies of the present invention.

[0011] In other aspects, the invention provides transgenic cells and non-human organisms comprising PCCP1 nucleic acids, and transgenic cells and non-human organisms with targeted disruption of the endogenous orthologue of the PCCP1.

[0012] The invention additionally provides diagnostic, investigational, and therapeutic methods based on the PCCP1 nucleic acids, proteins, and antibodies of the present invention.

### BRIEF DESCRIPTION OF THE DRAWINGS

[0013] The above and other objects and advantages of the present invention will be apparent upon consideration of the following detailed description taken in conjunction with the accompanying drawings, in which like characters refer to like parts throughout, and in which:

[0014] FIG. 1(A) schematizes the protein domain structure of PCCP1, FIG. 1(B) shows the alignment of the CHROMO domain of PCCP1 with that of other proteins and FIG. 1(C) shows the alignment of the ECH domain of the PCCP1 protein with that of other proteins;

[0015] FIG. 2 is a map showing the genomic structure of PCCP1 encoded at chromosome 16q23.2;

[0016] FIG. 3 presents the nucleotide and predicted amino acid sequences of PCCP1; and

[0017] FIG. 4 presents the expression profile of PCCP1 by RT-PCR analysis.

### DETAILED DESCRIPTION OF THE INVENTION

[0018] Mining the sequence of the human genome for novel human genes, the present inventors have identified PCCP1, a potential tumor suppressor gene mutations of which could lead to prostate tumor.

[0019] As schematized in FIG. 1, the newly isolated gene product shares certain protein domains and an overall structural organization with testis-specific chromodomain Y-like protein. The shared structural features strongly imply that PCCP1 plays a role similar to that of testis-specific chromodomain Y-like protein in regulating chromosomal structure and function.

[0020] Like testis-specific chromodomain Y-like protein, PCCP1 contains the CHROMO (Chromatin organization modifier) domain. In PCCP1, the CHROMO motif ocurrs at amino acids 7-55 (http://www.ncbi.nlm.gov/Structure/cdd/). The CHROMO domain can modify the chromatin structure to the condensed morphology of heterochromatin, and has been shown to be important for chromatin targeting. PCCP1 also contains the ECH (Enoyl-CoA hydratase/isomerase family). In PCCP1, the ECH motif ocurrs at amino acids 273-433. The ECH family contains a diverse set of enzymes which catalyze oxidization of fatty acids.

[0021] Other signatures of the newly isolated PCCP1 protein was identified by searching the PROSITE database (http://www.expasy.ch/tools/scnpsit1.html). These include two N-glycosylation sites (172-175 and 244-247), two cAMP- and cGMP-dependent protein kinase phosphorylation site (326-329 and 416-419), eleven protein kinase C phosphorylation sites (68-70, 74-76, 90-92, 103-105, 121-123, 136-138, 163-165, 240-242, 323-325, 329-331 and 375-377), seven Casein kinase II phosphorylation sites (34-37, 126-129, 163-166, 199-202, 310-313, 419-422, and 470-473), one tyrosine kinase phosphorylation site (224-231), ten N-myristoylation sites (57-62, 127-132, 155-160, 178-183, 204-209, 207 212, 305-310, 311-316, 360-365, and 404-409), and a single amidation site at 414-417.

[0022] FIG. 2 shows the genomic organization of PCCP1.

[0023] At the top is shown two bacterial artificial chromosomes (BACs), with GenBank accession numbers (AC009070 and AC092332), that span the PCCP1 locus.

[0024] As shown in FIG. 2, PCCP1, encoding a protein of 507 amino acids, and comprising exons 1-7. The predicted molecular weights of the PCCP1 protein, prior to any post-translational modification, is 56.6 kD.

[0025] As further discussed in the examples herein, expression of PCCP1 was assessed using RT-PCR. PCCP1 was found highly expressed in prostate, moderately in prostate tumor, colon tumor and testis, weakly in placenta, adrenal gland, lung, bone marrow and brain, but was not found in skeletal muscle, kidney, heart and liver.

[0026] As more fully described below, the present invention provides isolated nucleic acids that encode PCCP1 and fragments thereof. The invention further provides vectors for propagation and expression of the nucleic acids of the present invention, host cells comprising the nucleic acids and vectors of the present invention, proteins, protein fragments, and protein fusions of the present invention, and antibodies specific for all or any one of the isoforms. The invention provides pharmaceutical formulations of the nucleic acids, proteins, and antibodies of the present invention. The invention further provides transgenic cells and non-human organisms comprising human PCCP1 nucleic acids, and transgenic cells and non-human organisms with targeted disruption of the endogenous orthologue of the human PCCP1. The invention additionally provides diagnostic, investigational, and therapeutic methods based on the PCCP1 nucleic acids, proteins, and antibodies of the present invention.

[0027] Definitions

[0028] Unless defined otherwise, all technical and scientific terms used herein have the meaning commonly understood by one of ordinary skill in the art to which this invention belongs.

[0029] As used herein, “nucleic acid” (synonymously, “polynucleotide”) includes polynucleotides having natural nucleotides in native 5′-3′ phosphodiester linkage—e.g., DNA or RNA—as well as polynucleotides that have nonnatural nucleotide analogues, normative internucleoside bonds, or both, so long as the nonnatural polynucleotide is capable of sequence-discriminating basepairing under experimentally desired conditions. Unless otherwise specified, the term “nucleic acid” includes any topological conformation; the term thus explicitly comprehends single-stranded, double-stranded, partially duplexed, triplexed, hairpinned, circular, and padlocked conformations.

[0030] As used herein, an “isolated nucleic acid” is a nucleic acid molecule that exists in a physical form that is nonidentical to any nucleic acid molecule of identical sequence as found in nature; “isolated” does not require, although it does not prohibit, that the nucleic acid so described has itself been physically removed from its native environment.

[0031] For example, a nucleic acid can be said to be “isolated” when it includes nucleotides and/or internucleoside bonds not found in nature. When instead composed of natural nucleosides in phosphodiester linkage, a nucleic acid can be said to be “isolated” when it exists at a purity not found in nature, where purity can be adjudged with respect to the presence of nucleic acids of other sequence, with respect to the presence of proteins, with respect to the presence of lipids, or with respect the presence of any other component of a biological cell, or when the nucleic acid lacks sequence that flanks an otherwise identical sequence in an organism's genome, or when the nucleic acid possesses sequence not identically present in nature.

[0032] As so defined, “isolated nucleic acid” includes nucleic acids integrated into a host cell chromosome at a heterologous site, recombinant fusions of a native fragment to a heterologous sequence, recombinant vectors present as episomes or as integrated into a host cell chromosome.

[0033] As used herein, an isolated nucleic acid “encodes” a reference polypeptide when at least a portion of the nucleic acid, or its complement, can be directly translated to provide the amino acid sequence of the reference polypeptide, or when the isolated nucleic acid can be used, alone or as part of an expression vector, to express the reference polypeptide in vitro, in a prokaryotic host cell, or in a eukaryotic host cell.

[0034] As used herein, the term “exon” refers to a nucleic acid sequence found in genomic DNA that is bioinformatically predicted and/or experimentally confirmed to contribute contiguous sequence to a mature mRNA transcript.

[0035] As used herein, the phrase “open reading frame” and the equivalent acronym “ORF” refer to that portion of a transcript-derived nucleic acid that can be translated in its entirety into a sequence of contiguous amino acids. As so defined, an ORF has length, measured in nucleotides, exactly divisible by 3. As so defined, an ORF need not encode the entirety of a natural protein.

[0036] As used herein, the phrase “ORF-encoded peptide” refers to the predicted or actual translation of an ORF.

[0037] As used herein, the phrase “degenerate variant” of a reference nucleic acid sequence intends all nucleic acid sequences that can be directly translated, using the standard genetic code, to provide an amino acid sequence identical to that translated from the reference nucleic acid sequence.

[0038] As used herein, the term “microarray” and the equivalent phrase “nucleic acid microarray” refer to a substrate-bound collection of plural nucleic acids, hybridization to each of the plurality of bound nucleic acids being separately detectable. The substrate can be solid or porous, planar or non-planar, unitary or distributed.

[0039] As so defined, the term “microarray” and phrase “nucleic acid microarray” include all the devices so called in Schena (ed.), DNA Microarrays: A Practical Approach (Practical Approach Series), Oxford University Press (1999) (ISBN: 0199637768); Nature Genet. 21(1)(suppl):1-60 (1999); and Schena (ed.), Microarray Biochip: Tools and Technology, Eaton Publishing Company/BioTechniques Books Division (2000) (ISBN: 1881299376), the disclosures of which are incorporated herein by reference in their entireties.

[0040] As so defined, the term “microarray” and phrase “nucleic acid microarray” also include substrate-bound collections of plural nucleic acids in which the plurality of nucleic acids are distributably disposed on a plurality of beads, rather than on a unitary planar substrate, as is described, inter alia, in Brenner et al., Proc. Natl. Acad. Sci. USA 97(4):166501670 (2000), the disclosure of which is incorporated herein by reference in its entirety; in such case, the term “microarray” and phrase “nucleic acid microarray” refer to the plurality of beads in aggregate.

[0041] As used herein with respect to solution phase hybridization, the term “probe”, or equivalently, “nucleic acid probe” or “hybridization probe”, refers to an isolated nucleic acid of known sequence that is, or is intended to be, detectably labeled. As used herein with respect to a nucleic acid microarray, the term “probe” (or equivalently “nucleic acid probe” or “hybridization probe”) refers to the isolated nucleic acid that is, or is intended to be, bound to the substrate. In either such context, the term “target” refers to nucleic acid intended to be bound to probe by sequence complementarity.

[0042] As used herein, the expression “probe comprising SEQ ID NO:X”, and variants thereof, intends a nucleic acid probe, at least a portion of which probe has either (i) the sequence directly as given in the referenced SEQ ID NO:X, or (ii) a sequence complementary to the sequence as given in the referenced SEQ ID NO:X, the choice as between sequence directly as given and complement thereof dictated by the requirement that the probe be complementary to the desired target.

[0043] As used herein, the phrases “expression of a probe” and “expression of an isolated nucleic acid” and their linguistic equivalents intend that the probe or, (respectively, the isolated nucleic acid), or a probe (or, respectively, isolated nucleic acid) complementary in sequence thereto, can hybridize detectably under high stringency conditions to a sample of nucleic acids that derive from mRNA transcripts from a given source. For example, and by way of illustration only, expression of a probe in “liver” means that the probe can hybridize detectably under high stringency conditions to a sample of nucleic acids that derive from mRNA obtained from liver.

[0044] As used herein, “a single exon probe” comprises at least part of an exon (“reference exon”) and can hybridize detectably under high stringency conditions to transcript-derived nucleic acids that include the reference exon. The single exon probe will not, however, hybridize detectably under high stringency conditions to nucleic acids that lack the reference exon and that consist of one or more exons that are found adjacent to the reference exon in the genome.

[0045] For purposes herein, “high stringency conditions” are defined for solution phase hybridization as aqueous hybridization (i.e., free of formamide) in 6×SSC (where 20×SSC contains 3.0 M NaCl and 0.3 M sodium citrate), 1% SDS at 65° C. for at least 8 hours, followed by one or more washes in 0.2×SSC, 0.1% SDS at 65° C. “Moderate stringency conditions” are defined for solution phase hybridization as aqueous hybridization (i.e., free of formamide) in 6×SSC, 1% SDS at 65° C. for at least 8 hours, followed by one or more washes in 2×SSC, 0.1% SDS at room temperature.

[0046] For microarray-based hybridization, standard “high stringency conditions” are defined as hybridization in 50% formamide, 5×SSC, 0.2 μg/μl poly(dA), 0.2 μg/μl human cot1 DNA, and 0.5% SDS, in a humid oven at 42° C. overnight, followed by successive washes of the microarray in 1×SSC, 0.2% SDS at 55° C. for 5 minutes, and then 0.1×SSC, 0.2% SDS, at 55° C. for 20 minutes. For microarray-based hybridization, “moderate stringency conditions”, suitable for cross-hybridization to mRNA encoding structurally- and functionally-related proteins, are defined to be the same as those for high stringency conditions but with reduction in temperature for hybridization and washing to room temperature (approximately 25° C.).

[0047] As used herein, the terms “protein”, “polypeptide”, and “peptide” are used interchangeably to refer to a naturally-occurring or synthetic polymer of amino acid monomers (residues), irrespective of length, where amino acid monomer here includes naturally-occurring amino acids, naturally-occurring amino acid structural variants, and synthetic non-naturally occurring analogs that are capable of participating in peptide bonds. The terms “protein”, “polypeptide”, and “peptide” explicitly permits of post-translational and post-synthetic modifications, such as glycosylation.

[0048] The term “oligopeptide” herein denotes a protein, polypeptide, or peptide having 25 or fewer monomeric subunits.

[0049] The phrases “isolated protein”, “isolated polypeptide”, “isolated peptide” and “isolated oligopeptide” refer to a protein (or respectively to a polypeptide, peptide, or oligopeptide) that is nonidentical to any protein molecule of identical amino acid sequence as found in nature; “isolated” does not require, although it does not prohibit, that the protein so described has itself been physically removed from its native environment.

[0050] For example, a protein can be said to be “isolated” when it includes amino acid analogues or derivatives not found in nature, or includes linkages other than standard peptide bonds.

[0051] When instead composed entirely of natural amino acids linked by peptide bonds, a protein can be said to be “isolated” when it exists at a purity not found in nature—where purity can be adjudged with respect to the presence of proteins of other sequence, with respect to the presence of non-protein compounds, such as nucleic acids, lipids, or other components of a biological cell, or when it exists in a composition not found in nature, such as in a host cell that does not naturally express that protein.

[0052] A “purified protein” (equally, a purified polypeptide, peptide, or oligopeptide) is an isolated protein, as above described, present at a concentration of at least 95%, as measured on a weight basis with respect to total protein in a composition. A “substantially purified protein” (equally, a substantially purified polypeptide, peptide, or oligopeptide) is an isolated protein, as above described, present at a concentration of at least 70%, as measured on a weight basis with respect to total protein in a composition.

[0053] As used herein, the phrase “protein isoforms” refers to a plurality of proteins having nonidentical primary amino acid sequence but that share amino acid sequence encoded by at least one common exon.

[0054] As used herein, the phrase “alternative splicing” and its linguistic equivalents includes all types of RNA processing that lead to expression of plural protein isoforms from a single gene; accordingly, the phrase “splice variant(s)” and its linguistic equivalents embraces mRNAs transcribed from a given gene that, however processed, collectively encode plural protein isoforms. For example, and by way of illustration only, splice variants can include exon insertions, exon extensions, exon truncations, exon deletions, alternatives in the 5′ untranslated region (“5′ UT”) and alternatives in the 3′ untranslated region (“3′ UT”). Such 3′ alternatives include, for example, differences in the site of RNA transcript cleavage and site of poly(A) addition. See, e.g., Gautheret et al., Genome Res. 8:524-530 (1998).

[0055] As used herein, “orthologues” are separate occurrences of the same gene in multiple species. The separate occurrences have similar, albeit nonidentical, amino acid sequences, the degree of sequence similarity depending, in part, upon the evolutionary distance of the species from a common ancestor having the same gene.

[0056] As used herein, the term “paralogues” indicates separate occurrences of a gene in one species. The separate occurrences have similar, albeit nonidentical, amino acid sequences, the degree of sequence similarity depending, in part, upon the evolutionary distance from the gene duplication event giving rise to the separate occurrences.

[0057] As used herein, the term “homologues” is generic to “orthologues” and “paralogues”.

[0058] As used herein, the term “antibody” refers to a polypeptide, at least a portion of which is encoded by at least one immunoglobulin gene, or fragment thereof, and that can bind specifically to a desired target molecule. The term includes naturally-occurring forms, as well as fragments and derivatives.

[0059] Fragments within the scope of the term “antibody” include those produced by digestion with various proteases, those produced by chemical cleavage and/or chemical dissociation, and those produced recombinantly, so long as the fragment remains capable of specific binding to a target molecule. Among such fragments are Fab, Fab′, Fv, F(ab)′₂, and single chain Fv (scFv) fragments.

[0060] Derivatives within the scope of the term include antibodies (or fragments thereof) that have been modified in sequence, but remain capable of specific binding to a target molecule, including: interspecies chimeric and humanized antibodies; antibody fusions; heteromeric antibody complexes and antibody fusions, such as diabodies (bispecific antibodies), single-chain diabodies, and intrabodies (see, e.g., Marasco (ed.), Intracellular Antibodies: Research and Disease Applications, Springer-Verlag New York, Inc. (1998) (ISBN: 3540641513), the disclosure of which is incorporated herein by reference in its entirety).

[0061] As used herein, antibodies can be produced by any known technique, including harvest from cell culture of native B lymphocytes, harvest from culture of hybridomas, recombinant expression systems, and phage display.

[0062] As used herein, “antigen” refers to a ligand that can be bound by an antibody; an antigen need not itself be immunogenic. The portions of the antigen that make contact with the antibody are denominated “epitopes”.

[0063] “Specific binding” refers to the ability of two molecular species concurrently present in a heterogeneous (inhomogeneous) sample to bind to one another in preference to binding to other molecular species in the sample. Typically, a specific binding interaction will discriminate over adventitious binding interactions in the reaction by at least two-fold, more typically by at least 10-fold, often at least 100-fold; when used to detect analyte, specific binding is sufficiently discriminatory when determinative of the presence of the analyte in a heterogeneous (inhomogeneous) sample. Typically, the affinity or avidity of a specific binding reaction is least about 10⁻⁷ M, with specific binding reactions of greater specificity typically having affinity or avidity of at least 10⁻⁸ M to at least about 10⁻⁹ M.

[0064] As used herein, “molecular binding partners”—and equivalently, “specific binding partners”—refer to pairs of molecules, typically pairs of biomolecules, that exhibit specific binding. Nonlimiting examples are receptor and ligand, antibody and antigen, and biotin to any of avidin, streptavidin, neutrAvidin and captAvidin.

[0065] The term “antisense”, as used herein, refers to a nucleic acid molecule sufficiently complementary in sequence, and sufficiently long in that complementary sequence, as to hybridize under intracellular conditions to (i) a target mRNA transcript or (ii) the genomic DNA strand complementary to that transcribed to produce the target mRNA transcript.

[0066] The term “portion”, as used with respect to nucleic acids, proteins, and antibodies, is synonymous with “fragment”.

[0067] Nucleic Acid Molecules

[0068] In a first aspect, the invention provides isolated nucleic acids that encode PCCP1, variants having at least 65% sequence identity thereto, degenerate variants thereof, variants that encode PCCP1 proteins having conservative or moderately conservative substitutions, cross-hybridizing nucleic acids, and fragments thereof.

[0069] FIG. 3 presents the nucleotide sequence of the PCCP1 cDNA clone, with predicted amino acid translation; the sequences are further presented in the Sequence Listing, incorporated herein by reference in its entirety, in SEQ ID NOs: 1 (full length nucleotide sequence of human PCCP1 cDNA) and 3 (full length amino acid coding sequence of human PCCP1).

[0070] Unless otherwise indicated, each nucleotide sequence is set forth herein as a sequence of deoxyribonucleotides. It is intended, however, that the given sequence be interpreted as would be appropriate to the polynucleotide composition: for example, if the isolated nucleic acid is composed of RNA, the given sequence intends ribonucleotides, with uridine substituted for thymidine.

[0071] Unless otherwise indicated, nucleotide sequences of the isolated nucleic acids of the present invention were determined by sequencing a DNA molecule that had resulted, directly or indirectly, from at least one enzymatic polymerization reaction (e.g., reverse transcription and/or polymerase chain reaction) using an automated sequencer (such as the MegaBACE™ 1000, Amersham Biosciences, Sunnyvale, Calif., USA), or by reliance upon such sequence or upon genomic sequence prior-accessioned into a public database. Unless otherwise indicated, all amino acid sequences of the polypeptides of the present invention were predicted by translation from the nucleic acid sequences so determined.

[0072] As a consequence, any nucleic acid sequence presented herein may contain errors introduced by erroneous incorporation of nucleotides during polymerization, by erroneous base calling by the automated sequencer (although such sequencing errors have been minimized for the nucleic acids directly determined herein, unless otherwise indicated, by the sequencing of each of the complementary strands of a duplex DNA), or by similar errors accessioned into the public database. Such errors can readily be identified and corrected by resequencing of the genomic locus using standard techniques.

[0073] Single nucleotide polymorphisms (SNPs) occur frequently in eukaryotic genomes—more than 1.4 million SNPs have already identified in the human genome, International Human Genome Sequencing Consortium, Nature 409:860-921 (2001)—and the sequence determined from one individual of a species may differ from other allelic forms present within the population. Additionally, small deletions and insertions, rather than single nucleotide polymorphisms, are not uncommon in the general population, and often do not alter the function of the protein.

[0074] Accordingly, it is an aspect of the present invention to provide nucleic acids not only identical in sequence to those described with particularity herein, but also to provide isolated nucleic acids at least about 65% identical in sequence to those described with particularity herein, typically at least about 70%, 75%, 80%, 85%, or 90% identical in sequence to those described with particularity herein, usefully at least about 91%, 92%, 93%, 94%, or 95% identical in sequence to those described with particularity herein, usefully at least about 96%, 97%, 98%, or 99% identical in sequence to those described with particularity herein, and, most conservatively, at least about 99.5%, 99.6%, 99.7%, 99.8% and 99.9% identical in sequence to those described with particularity herein. These sequence variants can be naturally occurring or can result from human intervention, as by random or directed mutagenesis.

[0075] For purposes herein, percent identity of two nucleic acid sequences is determined using the procedure of Tatiana et al., “Blast 2 sequences—a new tool for comparing protein and nucleotide sequences”, FEMS Microbiol Lett. 174:247-250 (1999), which procedure is effectuated by the computer program BLAST 2 SEQUENCES, available online at

[0076] http://www.ncbi.nlm.nih.gov/blast/bl2seq/bl2.html.

[0077] To assess percent identity of nucleic acids, the BLASTN module of BLAST 2 SEQUENCES is used with default values of (i) reward for a match: 1; (ii) penalty for a mismatch: −2; (iii) open gap 5 and extension gap 2 penalties; (iv) gap X_dropoff 50 expect 10 word size 11 filter, and both sequences are entered in their entireties.

[0078] As is well known, the genetic code is degenerate, with each amino acid except methionine translated from a plurality of codons, thus permitting a plurality of nucleic acids of disparate sequence to encode the identical protein. As is also well known, codon choice for optimal expression varies from species to species. The isolated nucleic acids of the present invention being useful for expression of PCCP1 proteins and protein fragments, it is, therefore, another aspect of the present invention to provide isolated nucleic acids that encode PCCP1 proteins and portions thereof not only identical in sequence to those described with particularity herein, but degenerate variants thereof as well.

[0079] As is also well known, amino acid substitutions occur frequently among natural allelic variants, with conservative substitutions often occasioning only de minimis change in protein function.

[0080] Accordingly, it is an aspect of the present invention to provide nucleic acids not only identical in sequence to those described with particularity herein, but also to provide isolated nucleic acids that encode PCCP1, and portions thereof, having conservative amino acid substitutions, and also to provide isolated nucleic acids that encode PCCP1, and portions thereof, having moderately conservative amino acid substitutions.

[0081] Although there are a variety of metrics for calling conservative amino acid substitutions, based primarily on either observed changes among evolutionarily related proteins or on predicted chemical similarity, for purposes herein a conservative replacement is any change having a positive value in the PAM250 log-likelihood matrix reproduced herein below (see Gonnet et al., Science 256(5062):1443-5 (1992)):

| | A | R | N | D | C | Q | E | G | H | I | L | K | M | F | P | S | T | W | Y | V |
|---|---|---|---|---|---|---|---|---|---|---|---|---|---|---|---|---|---|---|---|---|
| A | 2 | −1 | 0 | 0 | 0 | 0 | 0 | 0 | −1 | −1 | −1 | 0 | −1 | −2 | 0 | 1 | 1 | −4 | −2 | 0 |
| R | −1 | 5 | 0 | 0 | −2 | 2 | 0 | −1 | 1 | −2 | −2 | 3 | −2 | −3 | −1 | 0 | 0 | −2 | −2 | −2 |
| N | 0 | 0 | 4 | 2 | −2 | 1 | 1 | 0 | 1 | −3 | −3 | 1 | −2 | −3 | −1 | 1 | 0 | −4 | −1 | −2 |
| D | 0 | 0 | 2 | 5 | −3 | 1 | 3 | 0 | 0 | −4 | −4 | 0 | −3 | −4 | −1 | 0 | 0 | −5 | −3 | −3 |
| C | 0 | −2 | −2 | −3 | 12 | −2 | −3 | −2 | −1 | −1 | −2 | −3 | −1 | −1 | −3 | 0 | 0 | −1 | 0 | 0 |
| Q | 0 | 2 | 1 | 1 | −2 | 3 | 2 | −1 | 1 | −2 | −2 | 2 | −1 | −3 | 0 | 0 | 0 | −3 | −2 | −2 |
| E | 0 | 0 | 1 | 3 | −3 | 2 | 4 | −1 | 0 | −3 | −3 | 1 | −2 | −4 | 0 | 0 | 0 | −4 | −3 | −2 |
| G | 0 | −1 | 0 | 0 | −2 | −1 | −1 | 7 | −1 | −4 | −4 | −1 | −4 | −5 | −2 | 0 | −1 | −4 | −4 | −3 |
| H | −1 | 1 | 1 | 0 | −1 | 1 | 0 | −1 | 6 | −2 | −2 | 1 | −1 | 0 | −1 | 0 | 0 | −1 | 2 | −2 |
| I | −1 | −2 | −3 | −4 | −1 | −2 | −3 | −4 | −2 | 4 | 3 | −2 | 2 | 1 | −3 | −2 | −1 | −2 | −1 | 3 |
| L | −1 | −2 | −3 | −4 | −2 | −2 | −3 | −4 | −2 | 3 | 4 | −2 | 3 | 2 | −2 | −2 | −1 | −1 | 0 | 2 |
| K | 0 | 3 | 1 | 0 | −3 | 2 | 1 | −1 | 1 | −2 | −2 | 3 | −1 | −3 | −1 | 0 | 0 | −4 | −2 | −2 |
| M | −1 | −2 | −2 | −3 | −1 | −1 | −2 | −4 | −1 | 2 | 3 | −1 | 4 | 2 | −2 | −1 | −1 | −1 | 0 | 2 |
| F | −2 | −3 | −3 | −4 | −1 | −3 | −4 | −5 | 0 | 1 | 2 | −3 | 2 | 7 | −4 | −3 | −2 | 4 | 5 | 0 |
| P | 0 | −1 | −1 | −1 | −3 | 0 | 0 | −2 | −1 | −3 | −2 | −1 | −2 | −4 | 8 | 0 | 0 | −5 | −3 | −2 |
| S | 1 | 0 | 1 | 0 | 0 | 0 | 0 | 0 | 0 | −2 | −2 | 0 | −1 | −3 | 0 | 2 | 2 | −3 | −2 | −1 |
| T | 1 | 0 | 0 | 0 | 0 | 0 | 0 | −1 | 0 | −1 | −1 | 0 | −1 | −2 | 0 | 2 | 2 | −4 | −2 | 0 |
| W | −4 | −2 | −4 | −5 | −1 | −3 | −4 | −4 | −1 | −2 | −1 | −4 | −1 | 4 | −5 | −3 | −4 | 14 | 4 | −3 |
| Y | −2 | −2 | −1 | −3 | 0 | −2 | −3 | −4 | 2 | −1 | 0 | −2 | 0 | 5 | −3 | −2 | −2 | 4 | 8 | −1 |
| V | 0 | −2 | −2 | −3 | 0 | −2 | −2 | −3 | −2 | 3 | 2 | −2 | 2 | 0 | −2 | −1 | 0 | −3 | −1 | 3 |

[0082] For purposes herein, a “moderately conservative” replacement is any change having a nonnegative value in the PAM250 log-likelihood matrix reproduced herein above.

[0083] As is also well known in the art, relatedness of nucleic acids can also be characterized using a functional test, the ability of the two nucleic acids to base-pair to one another at defined hybridization stringencies.

[0084] It is, therefore, another aspect of the invention to provide isolated nucleic acids not only identical in sequence to those described with particularity herein, but also to provide isolated nucleic acids (“cross-hybridizing nucleic acids”) that hybridize under high stringency conditions (as defined herein below) to all or to a portion of various of the isolated PCCP1 nucleic acids of the present invention (“reference nucleic acids”), as well as cross-hybridizing nucleic acids that hybridize under moderate stringency conditions to all or to a portion of various of the isolated PCCP1 nucleic acids of the present invention.

[0085] Such cross-hybridizing nucleic acids are useful, inter alia, as probes for, and to drive expression of, proteins related to the proteins of the present invention as alternative isoforms, homologues, paralogues, and orthologues. Particularly useful orthologues are those from other primate species, such as chimpanzee, rhesus macaque, monkey, baboon, orangutan, and gorilla; from rodents, such as rats, mice, guinea pigs; from lagomorphs, such as rabbits; and from domestic livestock, such as cow, pig, sheep, horse, goat and chicken.

[0086] For purposes herein, high stringency conditions are defined as aqueous hybridization (i.e., free of formamide) in 6×SSC (where 20×SSC contains 3.0 M NaCl and 0.3 M sodium citrate), 1% SDS at 65° C. for at least 8 hours, followed by one or more washes in 0.2×SSC, 0.1% SDS at 65° C. For purposes herein, moderate stringency conditions are defined as aqueous hybridization (i.e., free of formamide) in 6×SSC, 1% SDS at 65° C. for at least 8 hours, followed by one or more washes in 2×SSC, 0.1% SDS at room temperature.

[0087] The hybridizing portion of the reference nucleic acid is typically at least 15 nucleotides in length, often at least 17 nucleotides in length. Often, however, the hybridizing portion of the reference nucleic acid is at least 20 nucleotides in length, 25 nucleotides in length, and even 30 nucleotides, 35 nucleotides, 40 nucleotides, and 50 nucleotides in length. Of course, cross-hybridizing nucleic acids that hybridize to a larger portion of the reference nucleic acid—for example, to a portion of at least 50 nt, at least 100 nt, at least 150 nt, 200 nt, 250 nt, 300 nt, 350 nt, 400 nt, 450 nt, or 500 nt or more—or even to the entire length of the reference nucleic acid, are also useful.

[0088] The hybridizing portion of the cross-hybridizing nucleic acid is at least 75% identical in sequence to at least a portion of the reference nucleic acid. Typically, the hybridizing portion of the cross-hybridizing nucleic acid is at least 80%, often at least 85%, 86%, 87%, 88%, 89% or even at least 90% identical in sequence to at least a portion of the reference nucleic acid. Often, the hybridizing portion of the cross-hybridizing nucleic acid will be at least 91%, 92%, 93%, 94%, 95%, 96%, 97%, 98%, or 99% identical in sequence to at least a portion of the reference nucleic acid sequence. At times, the hybridizing portion of the cross-hybridizing nucleic acid will be at least 99.5% identical in sequence to at least a portion of the reference nucleic acid.

[0089] The invention also provides fragments of various of the isolated nucleic acids of the present invention.

[0090] By “fragments” of a reference nucleic acid is here intended isolated nucleic acids, however obtained, that have a nucleotide sequence identical to a portion of the reference nucleic acid sequence, which portion is at least 17 nucleotides and less than the entirety of the reference nucleic acid. As so defined, “fragments” need not be obtained by physical fragmentation of the reference nucleic acid, although such provenance is not thereby precluded.

[0091] In theory, an oligonucleotide of 17 nucleotides is of sufficient length as to occur at random less frequently than once in the three gigabase human genome, and thus to provide a nucleic acid probe that can uniquely identify the reference sequence in a nucleic acid mixture of genomic complexity. As is well known, further specificity can be obtained by probing nucleic acid samples of subgenomic complexity, and/or by using plural fragments as short as 17 nucleotides in length collectively to prime amplification of nucleic acids, as, e.g., by polymerase chain reaction (PCR).

[0092] As further described herein below, nucleic acid fragments that encode at least 6 contiguous amino acids (i.e., fragments of 18 nucleotides or more) are useful in directing the expression or the synthesis of peptides that have utility in mapping the epitopes of the protein encoded by the reference nucleic acid. See, e.g., Geysen et al., “Use of peptide synthesis to probe viral antigens for epitopes to a resolution of a single amino acid,” Proc. Natl. Acad. Sci. USA 81:3998-4002 (1984); and U.S. Pat. Nos. 4,708,871 and 5,595,915, the disclosures of which are incorporated herein by reference in their entireties.

[0093] As further described herein below, fragments that encode at least 8 contiguous amino acids (i.e., fragments of 24 nucleotides or more) are useful in directing the expression or the synthesis of peptides that have utility as immunogens. See, e.g., Lerner, “Tapping the immunological repertoire to produce antibodies of predetermined specificity,” Nature 299:592-596 (1982); Shinnick et al., “Synthetic peptide immunogens as vaccines,” Annu. Rev. Microbiol. 37:425-46 (1983); Sutcliffe et al., “Antibodies that react with predetermined sites on proteins,” Science 219:660-6 (1983), the disclosures of which are incorporated herein by reference in their entireties.

[0094] The nucleic acid fragment of the present invention is thus at least 17 nucleotides in length, typically at least 18 nucleotides in length, and often at least 24 nucleotides in length. Often, the nucleic acid of the present invention is at least 25 nucleotides in length, and even 30 nucleotides, 35 nucleotides, 40 nucleotides, or 45 nucleotides in length. Of course, larger fragments having at least 50 nt, at least 100 nt, at least 150 nt, 200 nt, 250 nt, 300 nt, 350 nt, 400 nt, 450 nt, or 500 nt or more are also useful, and at times preferred.

[0095] Having been based upon the mining of genomic sequence, rather than upon surveillance of expressed message, the present invention further provides isolated genome-derived nucleic acids that include portions of the PCCP1 gene.

[0096] The invention particularly provides genome-derived single exon probes.

[0097] As further described in commonly owned and copending U.S. patent application Ser. No. 09/864,761, filed May 23, 2001; Ser. No. 09/774,203, filed Jan. 29, 2001; and Ser. No. 09/632,366, filed Aug. 3, 2000, the disclosures of which are incorporated herein by reference in their entireties, “a single exon probe” comprises at least part of an exon (“reference exon”) and can hybridize detectably under high stringency conditions to transcript-derived nucleic acids that include the reference exon. The single exon probe will not, however, hybridize detectably under high stringency conditions to nucleic acids that lack the reference exon and instead consist of one or more exons that are found adjacent to the reference exon in the genome.

[0098] Genome-derived single exon probes typically further comprise, contiguous to a first end of the exon portion, a first intronic and/or intergenic sequence that is identically contiguous to the exon in the genome. Often, the genome-derived single exon probe further comprises, contiguous to a second end of the exonic portion, a second intronic and/or intergenic sequence that is identically contiguous to the exon in the genome.

[0099] The minimum length of genome-derived single exon probes is defined by the requirement that the exonic portion be of sufficient length to hybridize under high stringency conditions to transcript-derived nucleic acids. Accordingly, the exon portion is at least 17 nucleotides, typically at least 18 nucleotides, 20 nucleotides, 24 nucleotides, 25 nucleotides or even 30, 35, 40, 45, or 50 nucleotides in length, and can usefully include the entirety of the exon, up to 100 nt, 150 nt, 200 nt, 250 nt, 300 nt, 350 nt, 400 nt or even 500 nt or more in length.

[0100] The maximum length of genome-derived single exon probes is defined by the requirement that the probes contain portions of no more than one exon, that is, be unable to hybridize detectably under high stringency conditions to nucleic acids that lack the reference exon but include one or more exons that are found adjacent to the reference exon the genome.

[0101] Given variable spacing of exons through eukaryotic genomes, the maximum length of single exon probes of the present invention is typically no more than 25 kb, often no more than 20 kb, 15 kb, 10 kb or 7.5 kb, or even no more than 5 kb, 4 kb, 3 kb, or even no more than about 2.5 kb in length.

[0102] The genome-derived single exon probes of the present invention can usefully include at least a first terminal priming sequence not found in contiguity with the rest of the probe sequence in the genome, and often will contain a second terminal priming sequence not found in contiguity with the rest of the probe sequence in the genome.

[0103] The present invention also provides isolated genome-derived nucleic acids that include nucleic acid sequence elements that control transcription of the PCCP1 gene.

[0104] With a complete draft of the human genome now available, genomic sequences that are within the vicinity of the PCCP1 coding region (and that are additional to those described with particularity herein) can readily be obtained by PCR amplification.

[0105] The isolated nucleic acids of the present invention can be composed of natural nucleotides in native 5′-3′ phosphodiester internucleoside linkage—e.g., DNA or RNA—or can contain any or all of nonnatural nucleotide analogues, normative internucleoside bonds, or post-synthesis modifications, either throughout the length of the nucleic acid or localized to one or more portions thereof.

[0106] As is well known in the art, when the isolated nucleic acid is used as a hybridization probe, the range of such nonnatural analogues, normative internucleoside bonds, or post-synthesis modifications will be limited to those that permit sequence-discriminating basepairing of the resulting nucleic acid. When used to direct expression or RNA or protein in vitro or in vivo, the range of such nonnatural analogues, normative internucleoside bonds, or post-synthesis modifications will be limited to those that permit the nucleic acid to function properly as a polymerization substrate. When the isolated nucleic acid is used as a therapeutic agent, the range of such changes will be limited to those that do not confer toxicity upon the isolated nucleic acid.

[0107] For example, when desired to be used as probes, the isolated nucleic acids of the present invention can usefully include nucleotide analogues that incorporate labels that are directly detectable, such as radiolabels or fluorophores, or nucleotide analogues that incorporate labels that can be visualized in a subsequent reaction, such as biotin or various haptens.

[0108] Common radiolabeled analogues include those labeled with ³³P, ³²P, and ³⁵S, such as α-³²P-dATP, α-³²P-dCTP, α-³²P-dGTP, α-³²P-dTTP, α-³²P-3′dATP, α-³²P-ATP, α-³²P-CTP, α-³²P-GTP, α-³²P-UTP, α-³⁵S-dATP, γ-³⁵S-GTP, γ-³³P-dATP, and the like.

[0109] Commercially available fluorescent nucleotide analogues readily incorporated into the nucleic acids of the present invention include Cy3-dCTP, Cy3-dUTP, Cy5-dCTP, Cy3-dUTP (Amersham Pharmacia Biotech, Piscataway, N.J., USA), fluorescein-12-dUTP, tetramethylrhodamine-6-dUTP, Texas Red®-5-dUTP, Cascade Blue®-7-dUTP, BODIPY® FL-14-dUTP, BODIPY® TMR-14-dUTP, BODIPY® TR-14-dUTP, Rhodamine Green™-5-dUTP, Oregon Green® 488-5-dUTP, Texas Red®-12-dUTP, BODIPY® 630/650-14-dUTP, BODIPY® 650/665-14-dUTP, Alexa Fluor® 488-5-dUTP, Alexa Fluor® 532-5-dUTP, Alexa Fluor® 568-5-dUTP, Alexa Fluor® 594-5-dUTP, Alexa Fluor® 546-14-dUTP, fluorescein-12-UTP, tetramethylrhodamine-6-UTP, Texas Red®-5-UTP, Cascade Blue®-7-UTP, BODIPY® FL-14-UTP, BODIPY® TMR-14-UTP, BODIPY® TR-14-UTP, Rhodamine Green™-5-UTP, Alexa Fluor® 488-5-UTP, Alexa Fluor® 546-14-UTP (Molecular Probes, Inc. Eugene, Oreg., USA).

[0110] Protocols are available for custom synthesis of nucleotides having other fluorophores. Henegariu et al., “Custom Fluorescent-Nucleotide Synthesis as an Alternative Method for Nucleic Acid Labeling,” Nature Biotechnol. 18:345-348 (2000), the disclosure of which is incorporated herein by reference in its entirety.

[0111] Haptens that are commonly conjugated to nucleotides for subsequent labeling include biotin (biotin-11-dUTP, Molecular Probes, Inc., Eugene, Oreg., USA; biotin-21-UTP, biotin-21-dUTP, Clontech Laboratories, Inc., Palo Alto, Calif., USA), digoxigenin (DIG-11-dUTP, alkali labile, DIG-11-UTP, Roche Diagnostics Corp., Indianapolis, Ind., USA), and dinitrophenyl (dinitrophenyl-11-dUTP, Molecular Probes, Inc., Eugene, Oreg., USA).

[0112] As another example, when desired to be used for antisense inhibition of transcription or translation, the isolated nucleic acids of the present invention can usefully include altered, often nuclease-resistant, internucleoside bonds. See Hartmann et al. (eds.), Manual of Antisense Methodology (Perspectives in Antisense Science), Kluwer Law International (1999) (ISBN:079238539X); Stein et al. (eds.), Applied Antisense Oligonucleotide Technology, Wiley-Liss (cover (1998) (ISBN: 0471172790); Chadwick et al. (eds.), Oligonucleotides as Therapeutic Agents—Symposium No. 209, John Wiley & Son Ltd (1997) (ISBN: 0471972797), the disclosures of which are incorporated herein by reference in their entireties. Such altered internucloside bonds are often desired also when the isolated nucleic acid of the present invention is to be used for targeted gene correction, Gamper et al., Nucl. Acids Res. 28(21):4332-4339 (2000), the disclosures of which are incorporated herein by reference in its entirety.

[0113] Modified oligonucleotide backbones often preferred when the nucleic acid is to be used for antisense purposes are, for example, phosphorothioates, chiral phosphorothioates, phosphorodithioates, phosphotriesters, aminoalkylphosphotriesters, methyl and other alkyl phosphonates including 3′-alkylene phosphonates and chiral phosphonates, phosphinates, phosphoramidates including 3′-amino phosphoramidate and aminoalkylphosphoramidates, thionophosphoramidates, thionoalkylphosphonates, thionoalkylphosphotriesters, and boranophosphates having normal 3′-5′ linkages, 2′-5′ linked analogs of these, and those having inverted polarity wherein the adjacent pairs of nucleoside units are linked 3′-5′ to 5′-3′ or 2′-5′ to 5′-2′. Representative U.S. patents that teach the preparation of the above phosphorus-containing linkages include, but are not limited to, U.S. Pat. Nos. 3,687,808; 4,469,863; 4,476,301; 5,023,243; 5,177,196; 5,188,897; 5,264,423; 5,276,019; 5,278,302; 5,286,717; 5,321,131; 5,399,676; 5,405,939; 5,453,496; 5,455,233; 5,466,677; 5,476,925; 5,519,126; 5,536,821; 5,541,306; 5,550,111; 5,563,253; 5,571,799; 5,587,361; and 5,625,050, the disclosures of which are incorporated herein by reference in their entireties.

[0114] Preferred modified oligonucleotide backbones for antisense use that do not include a phosphorus atom have backbones that are formed by short chain alkyl or cycloalkyl internucleoside linkages, mixed heteroatom and alkyl or cycloalkyl internucleoside linkages, or one or more short chain heteroatomic or heterocyclic internucleoside linkages. These include those having morpholino linkages (formed in part from the sugar portion of a nucleoside); siloxane backbones; sulfide, sulfoxide and sulfone backbones; formacetyl and thioformacetyl backbones; methylene formacetyl and thioformacetyl backbones; alkene containing backbones; sulfamate backbones; methyleneimino and methylenehydrazino backbones; sulfonate and sulfonamide backbones; amide backbones; and others having mixed N, O, S and CH₂ component parts. Representative U.S. patents that teach the preparation of the above backbones include, but are not limited to, U.S. Pat. Nos. 5,034,506; 5,166,315; 5,185,444; 5,214,134; 5,216,141; 5,235,033; 5,264,562; 5,264,564; 5,405,938; 5,434,257; 5,466,677; 5,470,967; 5,489,677; 5,541,307; 5,561,225; 5,596,086; 5,602,240; 5,610,289; 5,602,240; 5,608,046; 5,610,289; 5,618,704; 5,623,070; 5,663,312; 5,633,360; 5,677,437; and 5,677,439, the disclosures of which are incorporated herein by reference in their entireties.

[0115] In other preferred oligonucleotide mimetics, both the sugar and the internucleoside linkage are replaced with novel groups, such as peptide nucleic acids (PNA).

[0116] In PNA compounds, the phosphodiester backbone of the nucleic acid is replaced with an amide-containing backbone, in particular by repeating N-(2-aminoethyl) glycine units linked by amide bonds. Nucleobases are bound directly or indirectly to aza nitrogen atoms of the amide portion of the backbone, typically by methylene carbonyl linkages.

[0117] The uncharged nature of the PNA backbone provides PNA/DNA and PNA/RNA duplexes with a higher thermal stability than is found in DNA/DNA and DNA/RNA duplexes, resulting from the lack of charge repulsion between the PNA and DNA or RNA strand. In general, the Tm of a PNA/DNA or PNA/RNA duplex is 1° C. higher per base pair than the Tm of the corresponding DNA/DNA or DNA/RNA duplex (in 100 mM NaCl).

[0118] The neutral backbone also allows PNA to form stable DNA duplexes largely independent of salt concentration. At low ionic strength, PNA can be hybridized to a target sequence at temperatures that make DNA hybridization problematic or impossible. And unlike DNA/DNA duplex formation, PNA hybridization is possible in the absence of magnesium. Adjusting the ionic strength, therefore, is useful if competing DNA or RNA is present in the sample, or if the nucleic acid being probed contains a high level of secondary structure.

[0119] PNA also demonstrates greater specificity in binding to complementary DNA. A PNA/DNA mismatch is more destabilizing than DNA/DNA mismatch. A single mismatch in mixed a PNA/DNA 15-mer lowers the Tm by 8-20° C. (15° C. on average). In the corresponding DNA/DNA duplexes, a single mismatch lowers the Tm by 4-16° C. (11° C. on average). Because PNA probes can be significantly shorter than DNA probes, their specificity is greater.

[0120] Additionally, nucleases and proteases do not recognize the PNA polyamide backbone with nucleobase sidechains. As a result, PNA oligomers are resistant to degradation by enzymes, and the lifetime of these compounds is extended both in vivo and in vitro. In addition, PNA is stable over a wide pH range.

[0121] Because its backbone is formed from amide bonds, PNA can be synthesized using a modified peptide synthesis protocol. PNA oligomers can be synthesized by both Fmoc and tBoc methods. Representative U.S. patents that teach the preparation of PNA compounds include, but are not limited to, U.S. Pat. Nos. 5,539,082; 5,714,331; and 5,719,262, each of which is herein incorporated by reference; automated PNA synthesis is readily achievable on commercial synthesizers (see, e.g., “PNA User's Guide,” Rev. 2, February 1998, Perseptive Biosystems Part No. 60138, Applied Biosystems, Inc., Foster City, Calif.).

[0122] PNA chemistry and applications are reviewed, inter alia, in Ray et al., FASEB J. 14(9):1041-60 (2000); Nielsen et al., Pharmacol Toxicol. 86(1):3-7 (2000); Larsen et al., Biochim Biophys Acta. 1489(1):159-66 (1999); Nielsen, Curr. Opin. Struct. Biol. 9(3):353-7 (1999), and Nielsen, Curr. Opin. Biotechnol. 10(1):71-5 (1999), the disclosures of which are incorporated herein by reference in their entireties.

[0123] Differences from nucleic acid compositions found in nature—e.g., normative bases, altered internucleoside linkages, post-synthesis modification—can be present throughout the length of the nucleic acid or can, instead, usefully be localized to discrete portions thereof. As an example of the latter, chimeric nucleic acids can be synthesized that have discrete DNA and RNA domains and demonstrated utility for targeted gene repair, as further described in U.S. Pat. Nos. 5,760,012 and 5,731,181, the disclosures of which are incorporated herein by reference in their entireties. As another example, chimeric nucleic acids comprising both DNA and PNA have been demonstrated to have utility in modified PCR reactions. See Misra et al., Biochem. 37: 1917-1925 (1998); see also Finn et al., Nucl. Acids Res. 24: 3357-3363 (1996), incorporated herein by reference.

[0124] Unless otherwise specified, nucleic acids of the present invention can include any topological conformation appropriate to the desired use; the term thus explicitly comprehends, among others, single-stranded, double-stranded, triplexed, quadruplexed, partially double-stranded, partially-triplexed, partially-quadruplexed, branched, hairpinned, circular, and padlocked conformations. Padlock conformations and their utilities are further described in Banér et al., Curr. Opin. Biotechnol. 12:11-15 (2001); Escude et al., Proc. Natl. Acad. Sci. USA 14;96(19):10603-7 (1999); Nilsson et al., Science 265(5181):2085-8 (1994), the disclosures of which are incorporated herein by reference in their entireties. Triplex and quadruplex conformations, and their utilities, are reviewed in Praseuth et al., Biochim. Biophys. Acta. 1489(1):181-206 (1999); Fox, Curr. Med. Chem. 7(1):17-37 (2000); Kochetkova et al., Methods Mol. Biol. 130:189-201 (2000); Chan et al., J. Mol. Med. 75(4):267-82 (1997), the disclosures of which are incorporated herein by reference in their entireties.

[0125] The nucleic acids of the present invention can be detectably labeled.

[0126] Commonly-used labels include radionuclides, such as ³²P, ³³P, ³⁵S, ³H (and for NMR detection, ¹³C and ¹⁵N), haptens that can be detected by specific antibody or high affinity binding partner (such as avidin), and fluorophores.

[0127] As noted above, detectable labels can be incorporated by inclusion of labeled nucleotide analogues in the nucleic acid. Such analogues can be incorporated by enzymatic polymerization, such as by nick translation, random priming, polymerase chain reaction (PCR), terminal transferase tailing, and end-filling of overhangs, for DNA molecules, and in vitro transcription driven, e.g., from phage promoters, such as T7, T3, and SP6, for RNA molecules. Commercial kits are readily available for each such labeling approach.

[0128] Analogues can also be incorporated during automated solid phase chemical synthesis.

[0129] As is well known, labels can also be incorporated after nucleic acid synthesis, with the 5′ phosphate and 3′ hydroxyl providing convenient sites for post-synthetic covalent attachment of detectable labels.

[0130] Various other post-synthetic approaches permit internal labeling of nucleic acids.

[0131] For example, fluorophores can be attached using a cisplatin reagent that reacts with the N7 of guanine residues (and, to a lesser extent, adenine bases) in DNA, RNA, and PNA to provide a stable coordination complex between the nucleic acid and fluorophore label (Universal Linkage System) (available from Molecular Probes, Inc., Eugene, Oreg., USA and Amersham Pharmacia Biotech, Piscataway, N.J., USA); see Alers et al., Genes, Chromosomes & Cancer, Vol. 25, pp. 301-305 (1999); Jelsma et al., J. NIH Res. 5:82 (1994); Van Belkum et al., BioTechniques 16:148-153 (1994), incorporated herein by reference. As another example, nucleic acids can be labeled using a disulfide-containing linker (FastTag™ Reagent, Vector Laboratories, Inc., Burlingame, Calif., USA) that is photo- or thermally coupled to the target nucleic acid using aryl azide chemistry; after reduction, a free thiol is available for coupling to a hapten, fluorophore, sugar, affinity ligand, or other marker.

[0132] Multiple independent or interacting labels can be incorporated into the nucleic acids of the present invention.

[0133] For example, both a fluorophore and a moiety that in proximity thereto acts to quench fluorescence can be included to report specific hybridization through release of fluorescence quenching, Tyagi et al., Nature Biotechnol. 14: 303-308 (1996); Tyagi et al., Nature Biotechnol. 16, 49-53 (1998); Sokol et al., Proc. Natl. Acad. Sci. USA 95: 11538-11543 (1998); Kostrikis et al., Science 279:1228-1229 (1998); Marras et al., Genet. Anal. 14: 151-156 (1999); U.S. Pat. Nos. 5,846,726, 5,925,517, 5,925,517, or to report exonucleotidic excision, U.S. Pat. No. 5,538,848; Holland et al., Proc. Natl. Acad. Sci. USA 88:7276-7280 (1991); Heid et al., Genome Res. 6(10):986-94 (1996); Kuimelis et al., Nucleic Acids Symp Ser. (37):255-6 (1997); U.S. Pat. No. 5,723,591, the disclosures of which are incorporated herein by reference in their entireties.

[0134] So labeled, the isolated nucleic acids of the present invention can be used as probes, as further described below.

[0135] Nucleic acids of the present invention can also usefully be bound to a substrate. The substrate can porous or solid, planar or non-planar, unitary or distributed; the bond can be covalent or noncovalent. Bound to a substrate, nucleic acids of the present invention can be used as probes in their unlabeled state.

[0136] For example, the nucleic acids of the present invention can usefully be bound to a porous substrate, commonly a membrane, typically comprising nitrocellulose, nylon, or positively-charged derivatized nylon; so attached, the nucleic acids of the present invention can be used to detect PCCP1 nucleic acids present within a labeled nucleic acid sample, either a sample of genomic nucleic acids or a sample of transcript-derived nucleic acids, e.g. by reverse dot blot.

[0137] The nucleic acids of the present invention can also usefully be bound to a solid substrate, such as glass, although other solid materials, such as amorphous silicon, crystalline silicon, or plastics, can also be used. Such plastics include polymethylacrylic, polyethylene, polypropylene, polyacrylate, polymethylmethacrylate, polyvinylchloride, polytetrafluoroethylene, polystyrene, polycarbonate, polyacetal, polysulfone, celluloseacetate, cellulosenitrate, nitrocellulose, or mixtures thereof.

[0138] Typically, the solid substrate will be rectangular, although other shapes, particularly disks and even spheres, present certain advantages. Particularly advantageous alternatives to glass slides as support substrates for array of nucleic acids are optical discs, as described in Demers, “Spatially Addressable Combinatorial Chemical Arrays in CD-ROM Format,” international patent publication WO 98/12559, incorporated herein by reference in its entirety.

[0139] The nucleic acids of the present invention can be attached covalently to a surface of the support substrate or applied to a derivatized surface in a chaotropic agent that facilitates denaturation and adherence by presumed noncovalent interactions, or some combination thereof.

[0140] The nucleic acids of the present invention can be bound to a substrate to which a plurality of other nucleic acids are concurrently bound, hybridization to each of the plurality of bound nucleic acids being separately detectable. At low density, e.g. on a porous membrane, these substrate-bound collections are typically denominated macroarrays; at higher density, typically on a solid support, such as glass, these substrate bound collections of plural nucleic acids are colloquially termed microarrays. As used herein, the term microarray includes arrays of all densities. It is, therefore, another aspect of the invention to provide microarrays that include the nucleic acids of the present invention.

[0141] The isolated nucleic acids of the present invention can be used as hybridization probes to detect, characterize, and quantify PCCP1 nucleic acids in, and isolate PCCP1 nucleic acids from, both genomic and transcript-derived nucleic acid samples. When free in solution, such probes are typically, but not invariably, detectably labeled; bound to a substrate, as in a microarray, such probes are typically, but not invariably unlabeled.

[0142] For example, the isolated nucleic acids of the present invention can be used as probes to detect and characterize gross alterations in the PCCP1 genomic locus, such as deletions, insertions, translocations, and duplications of the PCCP1 genomic locus through fluorescence in situ hybridization (FISH) to chromosome spreads. See, e.g., Andreeff et al. (eds.), Introduction to Fluorescence In Situ Hybridization: Principles and Clinical Applications, John Wiley & Sons (1999) (ISBN: 0471013455), the disclosure of which is incorporated herein by reference in its entirety. The isolated nucleic acids of the present invention can be used as probes to assess smaller genomic alterations using, e.g., Southern blot detection of restriction fragment length polymorphisms. The isolated nucleic acids of the present invention can be used as probes to isolate genomic clones that include the nucleic acids of the present invention, which thereafter can be restriction mapped and sequenced to identify deletions, insertions, translocations, and substitutions (single nucleotide polymorphisms, SNPs) at the sequence level.

[0143] The isolated nucleic acids of the present invention can also be used as probes to detect, characterize, and quantify PCCP1 nucleic acids in, and isolate PCCP1 nucleic acids from, transcript-derived nucleic acid samples.

[0144] For example, the isolated nucleic acids of the present invention can be used as hybridization probes to detect, characterize by length, and quantify PCCP1 mRNA by northern blot of total or poly-A⁺-selected RNA samples. For example, the isolated nucleic acids of the present invention can be used as hybridization probes to detect, characterize by location, and quantify PCCP1 message by in situ hybridization to tissue sections (see, e.g., Schwarchzacher et al., In Situ Hybridization, Springer-Verlag New York (2000) (ISBN: 0387915966), the disclosure of which is incorporated herein by reference in its entirety). For example, the isolated nucleic acids of the present invention can be used as hybridization probes to measure the representation of PCCP1 clones in a cDNA library. For example, the isolated nucleic acids of the present invention can be used as hybridization probes to isolate PCCP1 nucleic acids from cDNA libraries, permitting sequence level characterization of PCCP1 messages, including identification of deletions, insertions, truncations—including deletions, insertions, and truncations of exons in alternatively spliced forms—and single nucleotide polymorphisms.

[0145] All of the aforementioned probe techniques are well within the skill in the art, and are described at greater length in standard texts such as Sambrook et al., Molecular Cloning: A Laboratory Manual (3^{rd} ed.), Cold Spring Harbor Laboratory Press (2001) (ISBN: 0879695773); Ausubel et al. (eds.), Short Protocols in Molecular Biology: A Compendium of Methods from Current Protocols in Molecular Biology (4^{th} ed.), John Wiley & Sons, 1999 (ISBN: 047132938X); and Walker et al. (eds.), The Nucleic Acids Protocols Handbook, Humana Press (2000) (ISBN: 0896034593), the disclosures of which are incorporated herein by reference in their entirety.

[0146] As described in the Examples herein below, the nucleic acids of the present invention can also be used to detect and quantify PCCP1 nucleic acids in transcript-derived samples—that is, to measure expression of the PCCP1 gene—when included in a microarray. Measurement of PCCP1 expression has particular utility in diagnosis and treatment of cancer, as further described in the Examples herein below.

[0147] As would be readily apparent to one of skill in the art, each PCCP1 nucleic acid probe—whether labeled, substrate-bound, or both—is thus currently available for use as a tool for measuring the level of PCCP1 expression in each of the tissues in which expression has already been confirmed, notably prostate, testis, prostate tumor, colon tumor, placenta, adrenal gland, lung, bone marrow, and brain. The utility is specific to the probe: under high stringency conditions, the probe reports the level of expression of message specifically containing that portion of the PCCP1 gene included within the probe.

[0148] Measuring tools are well known in many arts, not just in molecular biology, and are known to possess credible, specific, and substantial utility. For example, U.S. Pat. No. 6,016,191 describes and claims a tool for measuring characteristics of fluid flow in a hydrocarbon well; U.S. Pat. No. 6,042,549 describes and claims a device for measuring exercise intensity; U.S. Pat. No. 5,889,351 describes and claims a device for measuring viscosity and for measuring characteristics of a fluid; U.S. Pat. No. 5,570,694 describes and claims a device for measuring blood pressure; U.S. Pat. No. 5,930,143 describes and claims a device for measuring the dimensions of machine tools; U.S. Pat. No. 5,279,044 describes and claims a measuring device for determining an absolute position of a movable element; U.S. Pat. No. 5,186,042 describes and claims a device for measuring action force of a wheel; and U.S. Pat. No. 4,246,774 describes and claims a device for measuring the draft of smoking articles such as cigarettes.

[0149] As for tissues not yet demonstrated to express PCCP1, the PCCP1 nucleic acid probes of the present invention are currently available as tools for surveying such tissues to detect the presence of PCCP1 nucleic acids.

[0150] Survey tools—i.e., tools for determining the presence and/or location of a desired object by search of an area—are well known in many arts, not just in molecular biology, and are known to possess credible, specific, and substantial utility. For example, U.S. Pat. No. 6,046,800 describes and claims a device for surveying an area for objects that move; U.S. Pat. No. 6,025,201 describes and claims an apparatus for locating and discriminating platelets from non-platelet particles or cells on a cell-by-cell basis in a whole blood sample; U.S. Pat. No. 5,990,689 describes and claims a device for detecting and locating anomalies in the electromagnetic protection of a system; U.S. Pat. No. 5,984,175 describes and claims a device for detecting and identifying wearable user identification units; U.S. Pat. No. 3,980,986 (“Oil well survey tool”), describes and claims a tool for finding the position of a drill bit working at the bottom of a borehole.

[0151] As noted above, the nucleic acid probes of the present invention are useful in constructing microarrays; the microarrays, in turn, are products of manufacture that are useful for measuring and for surveying gene expression.

[0152] When included on a microarray, each PCCP1 nucleic acid probe makes the microarray specifically useful for detecting that portion of the PCCP1 gene included within the probe, thus imparting upon the microarray device the ability to detect a signal where, absent such probe, it would have reported no signal. This utility makes each individual probe on such microarray akin to an antenna, circuit, firmware or software element included in an electronic apparatus, where the antenna, circuit, firmware or software element imparts upon the apparatus the ability newly and additionally to detect signal in a portion of the radio-frequency spectrum where previously it could not; such devices are known to have specific, substantial, and credible utility.

[0153] Changes in the level of expression need not be observed for the measurement of expression to have utility.

[0154] For example, where gene expression analysis is used to assess toxicity of chemical agents on cells, the failure of the agent to change a gene's expression level is evidence that the drug likely does not affect the pathway of which the gene's expressed protein is a part. Analogously, where gene expression analysis is used to assess side effects of pharmacologic agents—whether in lead compound discovery or in subsequent screening of lead compound derivatives—the inability of the agent to alter a gene's expression level is evidence that the drug does not affect the pathway of which the gene's expressed protein is a part.

[0155] WO 99/58720, incorporated herein by reference in its entirety, provides methods for quantifying the relatedness of a first and second gene expression profile and for ordering the relatedness of a plurality of gene expression profiles, without regard to the identity or function of the genes whose expression is used in the calculation.

[0156] Gene expression analysis, including gene expression analysis by microarray hybridization, is, of course, principally a laboratory-based art. Devices and apparatus used principally in laboratories to facilitate laboratory research are well-established to possess specific, substantial, and credible utility. For example, U.S. Pat. No. 6,001,233 describes and claims a gel electrophoresis apparatus having a cam-activated clamp; for example, U.S. Pat. No. 6,051,831 describes and claims a high mass detector for use in time-of-flight mass spectrometers; for example, U.S. Pat. No. 5,824,269 describes and claims a flow cytometer—as is well known, few gel electrophoresis apparatuses, TOF-MS devices, or flow cytometers are sold for consumer use.

[0157] Indeed, and in particular, nucleic acid microarrays, as devices intended for laboratory use in measuring gene expression, are well-established to have specific, substantial and credible utility. Thus, the microarrays of the present invention have at least the specific, substantial and credible utilities of the microarrays claimed as devices and articles of manufacture in the following U.S. patents, the disclosures of each of which is incorporated herein by reference: U.S. Pat. Nos. 5,445,934 (“Array of oligonucleotides on a solid substrate”); 5,744,305 (“Arrays of materials attached to a substrate”); and 6,004,752 (“Solid support with attached molecules”).

[0158] Genome-derived single exon probes and genome-derived single exon probe microarrays have the additional utility, inter alia, of permitting high-throughput detection of splice variants of the nucleic acids of the present invention, as further described in copending and commonly owned U.S. patent application Ser. No. 09/632,366, filed Aug. 3, 2000, the disclosure of which is incorporated herein by reference in its entirety.

[0159] The isolated nucleic acids of the present invention can also be used to prime synthesis of nucleic acid, for purpose of either analysis or isolation, using mRNA, cDNA, or genomic DNA as template.

[0160] For use as primers, at least 17 contiguous nucleotides of the isolated nucleic acids of the present invention will be used. Often, at least 18, 19, or 20 contiguous nucleotides of the nucleic acids of the present invention will be used, and on occasion at least 20, 22, 24, or 25 contiguous nucleotides of the nucleic acids of the present invention will be used, and even 30 nucleotides or more of the nucleic acids of the present invention can be used to prime specific synthesis.

[0161] The nucleic acid primers of the present invention can be used, for example, to prime first strand cDNA synthesis on an mRNA template.

[0162] Such primer extension can be done directly to analyze the message. Alternatively, synthesis on an mRNA template can be done to produce first strand cDNA. The first strand cDNA can thereafter be used, inter alia, directly as a single-stranded probe, as above-described, as a template for sequencing—permitting identification of alterations, including deletions, insertions, and substitutions, both normal allelic variants and mutations associated with abnormal phenotypes—or as a template, either for second strand cDNA synthesis (e.g., as an antecedent to insertion into a cloning or expression vector), or for amplification.

[0163] The nucleic acid primers of the present invention can also be used, for example, to prime single base extension (SBE) for SNP detection (see, e.g., U.S. Pat. No. 6,004,744, the disclosure of which is incorporated herein by reference in its entirety).

[0164] As another example, the nucleic acid primers of the present invention can be used to prime amplification of PCCP1 nucleic acids, using transcript-derived or genomic DNA as template.

[0165] Primer-directed amplification methods are now well-established in the art. Methods for performing the polymerase chain reaction (PCR) are compiled, inter alia, in McPherson, PCR (Basics: From Background to Bench), Springer Verlag (2000) (ISBN: 0387916008); Innis et al. (eds.), PCR Applications: Protocols for Functional Genomics, Academic Press (1999) (ISBN: 0123721857); Gelfand et al. (eds.), PCR Strategies, Academic Press (1998) (ISBN: 0123721822); Newton et al., PCR, Springer-Verlag New York (1997) (ISBN: 0387915060); Burke (ed.), PCR: Essential Techniques, John Wiley & Son Ltd (1996) (ISBN: 047195697X); White (ed.), PCR Cloning Protocols: From Molecular Cloning to Genetic Engineering, Vol. 67, Humana Press (1996) (ISBN: 0896033430); McPherson et al. (eds.), PCR 2: A Practical Approach, Oxford University Press, Inc. (1995) (ISBN: 0199634254), the disclosures of which are incorporated herein by reference in their entireties. Methods for performing RT-PCR are collected, e.g., in Siebert et al. (eds.), Gene Cloning and Analysis by RT-PCR, Eaton Publishing Company/Bio Techniques Books Division, 1998 (ISBN: 1881299147); Siebert (ed.), PCR Technique:RT-PCR, Eaton Publishing Company/BioTechniques Books (1995) (ISBN:1881299139), the disclosure of which is incorporated herein by reference in its entirety.

[0166] Isothermal amplification approaches, such as rolling circle amplification, are also now well-described. See, e.g., Schweitzer et al., Curr. Opin. Biotechnol. 12(1):21-7 (2001); U.S. Pat. Nos. 6,235,502, 6,221,603, 6,210,884, 6,183,960, 5,854,033, 5,714,320, 5,648,245, and international patent publications WO 97/19193 and WO 00/15779, the disclosures of which are incorporated herein by reference in their entireties. Rolling circle amplification can be combined with other techniques to facilitate SNP detection. See, e.g., Lizardi et al., Nature Genet. 19(3):225-32 (1998).

[0167] As further described below, nucleic acids of the present invention, inserted into vectors that flank the nucleic acid insert with a phage promoter, such as T7, T3, or SP6 promoter, can be used to drive in vitro expression of RNA complementary to either strand of the nucleic acid of the present invention. The RNA can be used, inter alia, as a single-stranded probe, in cDNA-mRNA subtraction, or for in vitro translation.

[0168] As will be further discussed herein below, nucleic acids of the present invention that encode PCCP1 protein or portions thereof can be used, inter alia, to express the PCCP1 proteins or protein fragments, either alone, or as part of fusion proteins.

[0169] Expression can be from genomic nucleic acids of the present invention, or from transcript-derived nucleic acids of the present invention.

[0170] Where protein expression is effected from genomic DNA, expression will typically be effected in eukaryotic, typically mammalian, cells capable of splicing introns from the initial RNA transcript. Expression can be driven from episomal vectors, such as EBV-based vectors, or can be effected from genomic DNA integrated into a host cell chromosome. As will be more fully described below, where expression is from transcript-derived (or otherwise intron-less) nucleic acids of the present invention, expression can be effected in wide variety of prokaryotic or eukaryotic cells.

[0171] Expressed in vitro, the protein, protein fragment, or protein fusion can thereafter be isolated, to be used, inter alia, as a standard in immunoassays specific for the proteins, or protein isoforms, of the present invention; to be used as a therapeutic agent, e.g., to be administered as passive replacement therapy in individuals deficient in the proteins of the present invention, or to be administered as a vaccine; to be used for in vitro production of specific antibody, the antibody thereafter to be used, e.g., as an analytical reagent for detection and quantitation of the proteins of the present invention or to be used as an immunotherapeutic agent.

[0172] The isolated nucleic acids of the present invention can also be used to drive in vivo expression of the proteins of the present invention. In vivo expression can be driven from a vector—typically a viral vector, often a vector based upon a replication incompetent retrovirus, an adenovirus, or an adeno-associated virus (AAV)—for purpose of gene therapy. In vivo expression can also be driven from signals endogenous to the nucleic acid or from a vector, often a plasmid vector, such as pVAX1 (Invitrogen, Carlsbad Calif., USA), for purpose of “naked” nucleic acid vaccination, as further described in U.S. Pat. Nos. 5,589,466; 5,679,647; 5,804,566; 5,830,877; 5,843,913; 5,880,104; 5,958,891; 5,985,847; 6,017,897; 6,110,898; 6,204,250, the disclosures of which are incorporated herein by reference in their entireties.

[0173] The nucleic acids of the present invention can also be used for antisense inhibition of transcription or translation. See Phillips (ed.), Antisense Technology, Part B, Methods in Enzymology Vol. 314, Academic Press, Inc. (1999) (ISBN: 012182215X); Phillips (ed.), Antisense Technology, Part A, Methods in Enzymology Vol. 313, Academic Press, Inc. (1999) (ISBN: 0121822141); Hartmann et al. (eds.), Manual of Antisense Methodology (Perspectives in Antisense Science), Kluwer Law International (1999) (ISBN:079238539X); Stein et al. (eds.), Applied Antisense Oligonucleotide Technology, Wiley-Liss (cover (1998) (ISBN: 0471172790); Agrawal et al. (eds.), Antisense Research and Application, Springer-Verlag New York, Inc. (1998) (ISBN: 3540638334); Lichtenstein et al. (eds.), Antisense Technology: A Practical Approach, Vol. 185, Oxford University Press, INC. (1998) (ISBN: 0199635838); Gibson (ed.), Antisense and Ribozyme Methodology: Laboratory Companion, Chapman & Hall (1997) (ISBN: 3826100794); Chadwick et al. (eds.), Oligonucleotides as Therapeutic Agents—Symposium No. 209, John Wiley & Son Ltd (1997) (ISBN: 0471972797), the disclosures of which are incorporated herein by reference in their entireties.

[0174] Nucleic acids of the present invention, particularly cDNAs of the present invention, that encode full-length human PCCP1 protein isoforms, have additional, well-recognized, immediate, real world utility as commercial products of manufacture suitable for sale.

[0175] For example, Invitrogen Corp. (Carlsbad, Calif., USA), through its Research Genetics subsidiary, sells full length human cDNAs cloned into one of a selection of expression vectors as GeneStorm® expression-ready clones; utility is specific for the gene, since each gene is capable of being ordered separately and has a distinct catalogue number, and utility is substantial, each clone selling for $650.00 US. Similarly, Incyte Genomics (Palo Alto, Calif., USA) sells clones from public and proprietary sources in multi-well plates or individual tubes.

[0176] Nucleic acids of the present invention that include genomic regions encoding the human PCCP1 protein, or portions thereof, have yet further utilities.

[0177] For example, genomic nucleic acids of the present invention can be used as amplification substrates, e.g. for preparation of genome-derived single exon probes of the present invention, as described above and in copending and commonly-owned U.S. patent application Ser. No. 09/864,761, filed May 23, 2001, Ser. No. 09/774,203, filed Jan. 29, 2001, and Ser. No. 09/632,366, filed Aug. 3, 2000, the disclosures of which are incorporated herein by reference in their entireties.

[0178] As another example, genomic nucleic acids of the present invention can be integrated non-homologously into the genome of somatic cells, e.g. CHO cells, COS cells, or 293 cells, with or without amplification of the insertional locus, in order, e.g., to create stable cell lines capable of producing the proteins of the present invention.

[0179] As another example, more fully described herein below, genomic nucleic acids of the present invention can be integrated nonhomologously into embryonic stem (ES) cells to create transgenic non-human animals capable of producing the proteins of the present invention.

[0180] Genomic nucleic acids of the present invention can also be used to target homologous recombination to the human PCCP1 locus. See, e.g., U.S. Pat. Nos. 6,187,305; 6,204,061; 5,631,153; 5,627,059; 5,487,992; 5,464,764; 5,614,396; 5,527,695 and 6,063,630; and Kmiec et al. (eds.), Gene Targeting Protocols, Vol. 133, Humana Press (2000) (ISBN: 0896033600); Joyner (ed.), Gene Targeting: A Practical Approach, Oxford University Press, Inc. (2000) (ISBN: 0199637938); Sedivy et al., Gene Targeting, Oxford University Press (1998) (ISBN: 071677013X); Tymms et al. (eds.), Gene Knockout Protocols, Humana Press (2000) (ISBN: 0896035727); Mak et al. (eds.), The Gene Knockout FactsBook, Vol. 2, Academic Press, Inc. (1998) (ISBN: 0124660444); Torres et al., Laboratory Protocols for Conditional Gene Targeting, Oxford University Press (1997) (ISBN: 019963677X); Vega (ed.), Gene Targeting, CRC Press, LLC (1994) (ISBN: 084938950X), the disclosures of which are incorporated herein by reference in their entireties.

[0181] Where the genomic region includes transcription regulatory elements, homologous recombination can be used to alter the expression of PCCP1, both for purpose of in vitro production of PCCP1 protein from human cells, and for purpose of gene therapy. See, e.g., U.S. Pat. Nos. 5,981,214, 6,048,524; 5,272,071.

[0182] Fragments of the nucleic acids of the present invention smaller than those typically used for homologous recombination can also be used for targeted gene correction or alteration, possibly by cellular mechanisms different from those engaged during homologous recombination.

[0183] For example, partially duplexed RNA/DNA chimeras have been shown to have utility in targeted gene correction, U.S. Pat. Nos. 5,945,339, 5,888,983, 5,871,984, 5,795,972, 5,780,296, 5,760,012, 5,756,325, 5,731,181, the disclosures of which are incorporated herein by reference in their entireties. So too have small oligonucleotides fused to triplexing domains have been shown to have utility in targeted gene correction, Culver et al., “Correction of chromosomal point mutations in human cells with bifunctional oligonucleotides,” Nature Biotechnol. 17(10):989-93 (1999), as have oligonucleotides having modified terminal bases or modified terminal internucleoside bonds, Gamper et al., Nucl. Acids Res. 28(21):4332-9 (2000), the disclosures of which are incorporated herein by reference.

[0184] The isolated nucleic acids of the present invention can also be used to provide the initial substrate for recombinant engineering of PCCP1 protein variants having desired phenotypic improvements. Such engineering includes, for example, site-directed mutagenesis, random mutagenesis with subsequent functional screening, and more elegant schemes for recombinant evolution of proteins, as are described, inter alia, in U.S. Pat. Nos. 6,180,406; 6,165,793; 6,117,679; and 6,096,548, the disclosures of which are incorporated herein by reference in their entireties.

[0185] Nucleic acids of the present invention can be obtained by using the labeled probes of the present invention to probe nucleic acid samples, such as genomic libraries, cDNA libraries, and mRNA samples, by standard techniques. Nucleic acids of the present invention can also be obtained by amplification, using the nucleic acid primers of the present invention, as further demonstrated in Example 1, herein below. Nucleic acids of the present invention of fewer than about 100 nt can also be synthesized chemically, typically by solid phase synthesis using commercially available automated synthesizers.

[0186] “Full Length” PCCP1 Nucleic Acids

[0187] In a first series of nucleic acid embodiments, the invention provides isolated nucleic acids that encode the entirety of the PCCP1 protein. As discussed above, the “full-length” nucleic acids of the present invention can be used, inter alia, to express full length PCCP1 protein. The full-length nucleic acids can also be used as nucleic acid probes; used as probes, the isolated nucleic acids of these embodiments will hybridize to PCCP1.

[0188] In a first such embodiment, the invention provides an isolated nucleic acid comprising (i) the nucleotide sequence of SEQ ID NO: 1, or (ii) the complement of (i). The SEQ ID NO: 1 presents the entire cDNA of PCCP1, including the 5′ untranslated (UT) region and 3′ UT.

[0189] In a second embodiment, the invention provides an isolated nucleic acid comprising (i) the nucleotide sequence of SEQ ID NO: 2, (ii) a degenerate variant of the nucleotide sequence of SEQ ID NO: 2, or (iii) the complement of (i) or (ii). SEQ ID NO: 2 presents the open reading frame (ORF) from SEQ ID NO: 1.

[0190] In a third embodiment, the invention provides an isolated nucleic acid comprising (i) a nucleotide sequence that encodes a polypeptide with the amino acid sequence of SEQ ID NO: 3 or (ii) the complement of a nucleotide sequence that encodes a polypeptide with the amino acid sequence of SEQ ID NO: 3. SEQ ID NO: 3 provides the amino acid sequence of PCCP1.

[0191] In a fourth embodiment, the invention provides an isolated nucleic acid having a nucleotide sequence that (i) encodes a polypeptide having the sequence of SEQ ID NO: 3, (ii) encodes a polypeptide having the sequence of SEQ ID NO: 3 with conservative amino acid substitutions, or (iii) that is the complement of (i) or (ii), where SEQ ID NO: 3 provides the amino acid sequence of PCCP1.

[0192] Selected Partial Nucleic Acids

[0193] In a second series of nucleic acid embodiments, the invention provides isolated nucleic acids that encode select portions of PCCP1. As will be further discussed herein below, these “partial” nucleic acids can be used, inter alia, to express specific portions of the PCCP1. These “partial” nucleic acids can also be used, inter alia, as nucleic probes.

[0194] In a first such embodiment, the invention provides an isolated nucleic acid comprising (i) the nucleotide sequence of SEQ ID NO: 4, (ii) a degenerate variant of SEQ ID NO: 6, or (iii) the complement of (i) or (ii), wherein the isolated nucleic acid is no more than about 100 kb in length, typically no more than about 75 kb in length, more typically no more than about 50 kb length. SEQ ID NO: 6 encodes a novel portion of PCCP1. Often, the isolated nucleic acids of this embodiment are no more than about 25 kb in length, often no more than about 15 kb in length, and frequently no more than about 10 kb in length.

[0195] In another embodiment, the invention provides an isolated nucleic acid comprising (i) a nucleotide sequence that encodes SEQ ID NO: 7 or (ii) the complement of a nucleotide sequence that encodes SEQ ID NO: 7, wherein the isolated nucleic acid is no more than about 100 kb in length, typically no more than about 75 kb in length, frequently no more than about 50 kb in length. SEQ ID NO: 7 is the amino acid sequence encoded by the portion of PCCP1 not found in any EST fragments. Often, the isolated nucleic acids of this embodiment are no more than about 25 kb in length, often no more than about 15 kb in length, and frequently no more than about 10 kb in length.

[0196] In another embodiment, the invention provides an isolated nucleic acid comprising (i) a nucleotide sequence that encodes SEQ ID NO: 7, (ii) a nucleotide sequence that encodes SEQ ID NO: 7 with conservative substitutions, or (iii) the complement of (i) or (ii), wherein the isolated nucleic acid is no more than about 100 kb in length, typically no more than about 75 kb in length, and often no more than about 50 kb in length. Often, the isolated nucleic acids of this embodiment are no more than about 25 kb in length, often no more than about 15 kb in length, and frequently no more than about 10 kb in length.

[0197] In another such embodiment, the invention provides an isolated nucleic acid comprising (i) the nucleotide sequence of SEQ ID NO: 8, (ii) a degenerate variant of SEQ ID NO: 9, or (iii) the complement of (i) or (ii), wherein the isolated nucleic acid is no more than about 100 kb in length, typically no more than about 75 kb in length, more typically no more than about 50 kb length. SEQ ID NO: 9 encodes a novel portion of PCCP1. Often, the isolated nucleic acids of this embodiment are no more than about 25 kb in length, often no more than about 15 kb in length, and frequently no more than about 10 kb in length.

[0198] In another embodiment, the invention provides an isolated nucleic acid comprising (i) a nucleotide sequence that encodes SEQ ID NO: 11 or (ii) the complement of a nucleotide sequence that encodes SEQ ID NO: 11, wherein the isolated nucleic acid is no more than about 100 kb in length, typically no more than about 75 kb in length, frequently no more than about 50 kb in length. SEQ ID NO: 11 is the amino acid sequence encoded by the portion of PCCP1 not found in any EST fragments. Often, the isolated nucleic acids of this embodiment are no more than about 25 kb in length, often no more than about 15 kb in length, and frequently no more than about 10 kb in length.

[0199] In another embodiment, the invention provides an isolated nucleic acid comprising (i) a nucleotide sequence that encodes SEQ ID NO: 11, (ii) a nucleotide sequence that encodes SEQ ID NO: 11 with conservative substitutions, or (iii) the complement of (i) or (ii), wherein the isolated nucleic acid is no more than about 100 kb in length, typically no more than about 75 kb in length, and often no more than about 50 kb in length. Often, the isolated nucleic acids of this embodiment are no more than about 25 kb in length, often no more than about 15 kb in length, and frequently no more than about 10 kb in length.

[0200] Cross-Hybridizing Nucleic Acids

[0201] In another series of nucleic acid embodiments, the invention provides isolated nucleic acids that hybridize to various of the PCCP1 nucleic acids of the present invention. These cross-hybridizing nucleic acids can be used, inter alia, as probes for, and to drive expression of, proteins that are related to PCCP1 of the present invention as further isoforms, homologues, paralogues, or orthologues.

[0202] In a first such embodiment, the invention provides an isolated nucleic acid comprising a sequence that hybridizes under high stringency conditions to a probe the nucleotide sequence of which consists of at least 17 nt, 18, 19, 20, 21, 22, 23, 24, 25, 30, 40, or 50 nt of SEQ ID NO: 4 or the complement of SEQ ID NO: 4, wherein the isolated nucleic acid is no more than about 100 kb in length, typically no more than about 75 kb in length, and often no more than about 50 kb in length. Often, the isolated nucleic acids of this embodiment are no more than about 25 kb in length, often no more than about 15 kb in length, and frequently no more than about 10 kb in length.

[0203] In a further embodiment, the invention provides an isolated nucleic acid comprising a sequence that hybridizes under moderate stringency conditions to a probe the nucleotide sequence of which consists of at least 17 nt, 18, 19, 20, 21, 22, 23, 24, 25, 30, 40, or 50 nt of SEQ ID NO: 4 or the complement of SEQ ID NO: 4, wherein the isolated nucleic acid is no more than about 100 kb in length, typically no more than about 75 kb in length, and often no more than about 50 kb in length. Often, the isolated nucleic acids of this embodiment are no more than about 25 kb in length, often no more than about 15 kb in length, and frequently no more than about 10 kb in length.

[0204] In a further embodiment, the invention provides an isolated nucleic acid comprising a sequence that hybridizes under high stringency conditions to a hybridization probe the nucleotide sequence of which (i) encodes a polypeptide having the sequence of SEQ ID NO: 7, (ii) encodes a polypeptide having the sequence of SEQ ID NO: 7 with conservative amino acid substitutions, or (iii) is the complement of (i) or (ii), wherein the isolated nucleic acid is no more than about 100 kb in length, typically no more than about 75 kb in length, and often no more than about 50 kb in length. Often, the isolated nucleic acids of this embodiment are no more than about 25 kb in length, often no more than about 15 kb in length, and frequently no more than about 10 kb in length.

[0205] In another such embodiment, the invention provides an isolated nucleic acid comprising a sequence that hybridizes under high stringency conditions to a probe the nucleotide sequence of which consists of at least 17 nt, 18, 19, 20, 21, 22, 23, 24, 25, 30, 40, or 50 nt of SEQ ID NO: 8 or the complement of SEQ ID NO: 8, wherein the isolated nucleic acid is no more than about 100 kb in length, typically no more than about 75 kb in length, and often no more than about 50 kb in length. Often, the isolated nucleic acids of this embodiment are no more than about 25 kb in length, often no more than about 15 kb in length, and frequently no more than about 10 kb in length.

[0206] In a further embodiment, the invention provides an isolated nucleic acid comprising a sequence that hybridizes under moderate stringency conditions to a probe the nucleotide sequence of which consists of at least 17 nt, 18, 19, 20, 21, 22, 23, 24, 25, 30, 40, or 50 nt of SEQ ID NO: 8 or the complement of SEQ ID NO: 8, wherein the isolated nucleic acid is no more than about 100 kb in length, typically no more than about 75 kb in length, and often no more than about 50 kb in length. Often, the isolated nucleic acids of this embodiment are no more than about 25 kb in length, often no more than about 15 kb in length, and frequently no more than about 10 kb in length.

[0207] In a further embodiment, the invention provides an isolated nucleic acid comprising a sequence that hybridizes under high stringency conditions to a hybridization probe the nucleotide sequence of which (i) encodes a polypeptide having the sequence of SEQ ID NO: 11, (ii) encodes a polypeptide having the sequence of SEQ ID NO: 11 with conservative amino acid substitutions, or

[0208] (iii) is the complement of (i) or (ii), wherein the isolated nucleic acid is no more than about 100 kb in length, typically no more than about 75 kb in length, and often no more than about 50 kb in length. Often, the isolated nucleic acids of this embodiment are no more than about 25 kb in length, often no more than about 15 kb in length, and frequently no more than about 10 kb in length.

[0209] Particularly Useful Nucleic Acids

[0210] Particularly useful among the above-described nucleic acids are those that are expressed, or the complement of which are expressed, in prostate, testis, prostate tumor, colon tumor, placenta, adrenal gland, lung, bone marrow, and brain, preferably at a level greater than that in skeletal muscle, kidney, heart and liver, typically at a level at least two-fold that in skeletal muscle, kidney, heart and liver, often at least three-fold, four-fold, or even five-fold that in skeletal muscle, kidney, heart and liver.

[0211] Also particularly useful among the above-described nucleic acids are those that encode, or the complement of which encode, a polypeptide having tumor suppressor activity.

[0212] Other particularly useful embodiments of the nucleic acids above-described are those that encode, or the complement of which encode, a polypeptide having any or all of a CHROMO domain, and/or an ECH domain.

[0213] Nucleic Acid Fragments

[0214] In another series of nucleic acid embodiments, the invention provides fragments of various of the isolated nucleic acids of the present invention which prove useful, inter alia, as nucleic acid probes, as amplification primers, and to direct expression or synthesis of epitopic or immunogenic protein fragments.

[0215] In a first such embodiment, the invention provides an isolated nucleic acid comprising at least 17 nucleotides, 18 nucleotides, 20 nucleotides, 24 nucleotides, or 25 nucleotides of (i) SEQ ID NO: 4, (ii) a degenerate variant of SEQ ID NO: 6, or (iii) the complement of (i) or (ii), wherein the isolated nucleic acid is no more than about 100 kb in length, typically no more than about 75 kb in length, more typically no more than about 50 kb in length. Often, the isolated nucleic acids of this embodiment are no more than about 25 kb in length, often no more than about 15 kb in length, and frequently no more than about 10 kb in length.

[0216] The invention also provides an isolated nucleic acid comprising (i) a nucleotide sequence that encodes a peptide of at least 8 contiguous amino acids of SEQ ID NO: 7, (ii) a nucleotide sequence that encodes a peptide of at least 15 contiguous amino acids of SEQ ID NO: 7, or (iii) the complement of (i) or (ii), wherein the isolated nucleic acid is no more than about 100 kb in length, typically no more than about 75 kb in length, more typically no more than about 50 kb in length. Often, the isolated nucleic acids of this embodiment are no more than about 25 kb in length, often no more than about 15 kb in length, and frequently no more than about 10 kb in length.

[0217] The invention also provides an isolated nucleic acid comprising a nucleotide sequence that encodes (i) a polypeptide having the sequence of at least 8 contiguous amino acids of SEQ ID NO: 7 with conservative amino acid substitutions, (ii) a polypeptide having the sequence of at least 15 contiguous amino acids of SEQ ID NO: 7 with conservative amino acid substitutions, (iii) a polypeptide having the sequence of at least 8 contiguous amino acids of SEQ ID NO: 7 with moderately conservative substitutions, (iv) a polypeptide having the sequence of at least 15 contiguous amino acids of SEQ ID NO: 7 with moderately conservative substitutions, or (v) the complement of any of (i)-(iv), wherein the isolated nucleic acid is no more than about 100 kb in length, typically no more than about 75 kb in length, more typically no more than about 50 kb in length. Often, the isolated nucleic acids of this embodiment are no more than about 25 kb in length, often no more than about 15 kb in length, and frequently no more than about 10 kb in length.

[0218] In another such embodiment, the invention provides an isolated nucleic acid comprising at least 17 nucleotides, 18 nucleotides, 20 nucleotides, 24 nucleotides, or 25 nucleotides of (i) SEQ ID NO: 8, (ii) a degenerate variant of SEQ ID NO: 9, or (iii) the complement of (i) or (ii), wherein the isolated nucleic acid is no more than about 100 kb in length, typically no more than about 75 kb in length, more typically no more than about 50 kb in length. Often, the isolated nucleic acids of this embodiment are no more than about 25 kb in length, often no more than about 15 kb in length, and frequently no more than about 10 kb in length.

[0219] The invention also provides an isolated nucleic acid comprising (i) a nucleotide sequence that encodes a peptide of at least 8 contiguous amino acids of SEQ ID NO: 11, (ii) a nucleotide sequence that encodes a peptide of at least 15 contiguous amino acids of SEQ ID NO: 11, or (iii) the complement of (i) or (ii), wherein the isolated nucleic acid is no more than about 100 kb in length, typically no more than about 75 kb in length, more typically no more than about 50 kb in length. Often, the isolated nucleic acids of this embodiment are no more than about 25 kb in length, often no more than about 15 kb in length, and frequently no more than about 10 kb in length.

[0220] The invention also provides an isolated nucleic acid comprising a nucleotide sequence that encodes (i) a polypeptide having the sequence of at least 8 contiguous amino acids of SEQ ID NO: 11 with conservative amino acid substitutions, (ii) a polypeptide having the sequence of at least 15 contiguous amino acids of SEQ ID NO: 11 with conservative amino acid substitutions, (iii) a polypeptide having the sequence of at least 8 contiguous amino acids of SEQ ID NO: 11 with moderately conservative substitutions, (iv) a polypeptide having the sequence of at least 15 contiguous amino acids of SEQ ID NO: 11 with moderately conservative substitutions, or (v) the complement of any of (i)-(iv), wherein the isolated nucleic acid is no more than about 100 kb in length, typically no more than about 75 kb in length, more typically no more than about 50 kb in length. Often, the isolated nucleic acids of this embodiment are no more than about 25 kb in length, often no more than about 15 kb in length, and frequently no more than about 10 kb in length.

[0221] Single Exon Probes

[0222] The invention further provides genome-derived single exon probes having portions of no more than one exon of the PCCP1 gene. As further described in commonly owned and copending U.S. patent application Ser. No. 09/632,366, filed Aug. 3, 2000 (“Methods and Apparatus for High Throughput Detection and Characterization of alternatively Spliced Genes”), the disclosure of which is incorporated herein by reference in its entirety, such single exon probes have particular utility in identifying and characterizing splice variants. In particular, such single exon probes are useful for identifying and discriminating the expression of distinct isoforms of PCCP1.

[0223] In a first embodiment, the invention provides an isolated nucleic acid comprising a nucleotide sequence of no more than one portion of SEQ ID NOs: 12-18 or the complement of SEQ ID NOs: 12-18, wherein the portion comprises at least 17 contiguous nucleotides, 18 contiguous nucleotides, 20 contiguous nucleotides, 24 contiguous nucleotides, 25 contiguous nucleotides, or 50 contiguous nucleotides of any one of SEQ ID NOs: 12-18, or their complement. In a further embodiment, the exonic portion comprises the entirety of the referenced SEQ ID NO: or its complement.

[0224] In other embodiments, the invention provides isolated single exon probes having the nucleotide sequence of any one of SEQ ID NOs: 19-25.

[0225] Transcription Control Nucleic Acids

[0226] In another aspect, the present invention provides genome-derived isolated nucleic acids that include nucleic acid sequence elements that control transcription of the PCCP1 gene. These nucleic acids can be used, inter alia, to drive expression of heterologous coding regions in recombinant constructs, thus conferring upon such heterologous coding regions the expression pattern of the native PCCP1 gene. These nucleic acids can also be used, conversely, to target heterologous transcription control elements to the PCCP1 genomic locus, altering the expression pattern of the PCCP1 gene itself.

[0227] In a first such embodiment, the invention provides an isolated nucleic acid comprising the nucleotide sequence of SEQ ID NO: 26 or its complement, wherein the isolated nucleic acid is no more than about 100 kb in length, typically no more than about 75 kb in length, more typically no more than about 50 kb in length. Often, the isolated nucleic acids of this embodiment are no more than about 25 kb in length, often no more than about 15 kb in length, and frequently no more than about 10 kb in length.

[0228] In another embodiment, the invention provides an isolated nucleic acid comprising at least 17, 18, 20, 24, or 25 nucleotides of the sequence of SEQ ID NO: 26 or its complement, wherein the isolated nucleic acid is no more than about 100 kb in length, typically no more than about 75 kb in length, more typically no more than about 50 kb in length. Often, the isolated nucleic acids of this embodiment are no more than about 25 kb in length, often no more than about 15 kb in length, and frequently no more than about 10 kb in length.

[0229] Vectors and Host Cells

[0230] In another aspect, the present invention provides vectors that comprise one or more of the isolated nucleic acids of the present invention, and host cells in which such vectors have been introduced.

[0231] The vectors can be used, inter alia, for propagating the nucleic acids of the present invention in host cells (cloning vectors), for shuttling the nucleic acids of the present invention between host cells derived from disparate organisms (shuttle vectors), for inserting the nucleic acids of the present invention into host cell chromosomes (insertion vectors), for expressing sense or antisense RNA transcripts of the nucleic acids of the present invention in vitro or within a host cell, and for expressing polypeptides encoded by the nucleic acids of the present invention, alone or as fusions to heterologous polypeptides. Vectors of the present invention will often be suitable for several such uses.

[0232] Vectors are by now well-known in the art, and are described, inter alia, in Jones et al. (eds.), Vectors: Cloning Applications: Essential Techniques (Essential Techniques Series), John Wiley & Son Ltd 1998 (ISBN: 047196266X); Jones et al. (eds.), Vectors: Expression Systems: Essential Techniques (Essential Techniques Series), John Wiley & Son Ltd, 1998 (ISBN:0471962678); Gacesa et al., Vectors: Essential Data, John Wiley & Sons, 1995 (ISBN: 0471948411); Cid-Arregui (eds.), Viral Vectors: Basic Science and Gene Therapy, Eaton Publishing Co., 2000 (ISBN: 188129935X); Sambrook et al., Molecular Cloning: A Laboratory Manual (3^{rd} ed.), Cold Spring Harbor Laboratory Press, 2001 (ISBN: 0879695773); Ausubel et al. (eds.), Short Protocols in Molecular Biology: A Compendium of Methods from Current Protocols in Molecular Biology (4^{th} ed.), John Wiley & Sons, 1999 (ISBN: 047132938X), the disclosures of which are incorporated herein by reference in their entireties. Furthermore, an enormous variety of vectors are available commercially. Use of existing vectors and modifications thereof being well within the skill in the art, only basic features need be described here.

[0233] Typically, vectors are derived from virus, plasmid, prokaryotic or eukaryotic chromosomal elements, or some combination thereof, and include at least one origin of replication, at least one site for insertion of heterologous nucleic acid, typically in the form of a polylinker with multiple, tightly clustered, single cutting restriction sites, and at least one selectable marker, although some integrative vectors will lack an origin that is functional in the host to be chromosomally modified, and some vectors will lack selectable markers. Vectors of the present invention will further include at least one nucleic acid of the present invention inserted into the vector in at least one location.

[0234] Where present, the origin of replication and selectable markers are chosen based upon the desired host cell or host cells; the host cells, in turn, are selected based upon the desired application.

[0235] For example, prokaryotic cells, typically E. coli, are typically chosen for cloning. In such case, vector replication is predicated on the replication strategies of coliform-infecting phage—such as phage lambda, M13, T7, T3 and P1—or on the replication origin of autonomously replicating episomes, notably the ColE1 plasmid and later derivatives, including pBR322 and the pUC series plasmids. Where E. coli is used as host, selectable markers are, analogously, chosen for selectivity in gram negative bacteria: e.g., typical markers confer resistance to antibiotics, such as ampicillin, tetracycline, chloramphenicol, kanamycin, streptomycin, zeocin; auxotrophic markers can also be used.

[0236] As another example, yeast cells, typically S. cerevisiae, are chosen, inter alia, for eukaryotic genetic studies, due to the ease of targeting genetic changes by homologous recombination and to the ready ability to complement genetic defects using recombinantly expressed proteins, for identification of interacting protein components, e.g. through use of a two-hybrid system, and for protein expression. Vectors of the present invention for use in yeast will typically, but not invariably, contain an origin of replication suitable for use in yeast and a selectable marker that is functional in yeast.

[0237] Integrative YIp vectors do not replicate autonomously, but integrate, typically in single copy, into the yeast genome at low frequencies and thus replicate as part of the host cell chromosome; these vectors lack an origin of replication that is functional in yeast, although they typically have at least one origin of replication suitable for propagation of the vector in bacterial cells. YEp vectors, in contrast, replicate episomally and autonomously due to presence of the yeast 2 micron plasmid origin (2 μm ori). The YCp yeast centromere plasmid vectors are autonomously replicating vectors containing centromere sequences, CEN, and autonomously replicating sequences, ARS; the ARS sequences are believed to correspond to the natural replication origins of yeast chromosomes. YACs are based on yeast linear plasmids, denoted YLp, containing homologous or heterologous DNA sequences that function as telomeres (TEL) in vivo, as well as containing yeast ARS (origins of replication) and CEN (centromeres) segments.

[0238] Selectable markers in yeast vectors include a variety of auxotrophic markers, the most common of which are (in Saccharomyces cerevisiae) URA3, HIS3, LEU2, TRP1 and LYS2, which complement specific auxotrophic mutations, such as ura3-52, his3-D1, leu2-D1, trp1-D1 and lys2-201. The URA3 and LYS2 yeast genes further permit negative selection based on specific inhibitors, 5-fluoro-orotic acid (FOA) and α-aminoadipic acid (αAA), respectively, that prevent growth of the prototrophic strains but allows growth of the ura3 and lys2 mutants, respectively. Other selectable markers confer resistance to, e.g., zeocin.

[0239] As yet another example, insect cells are often chosen for high efficiency protein expression. Where the host cells are from Spodoptera frugiperda—e.g., Sf9 and Sf21 cell lines, and expresSF™ cells (Protein Sciences Corp., Meriden, Conn., USA)—the vector replicative strategy is typically based upon the baculovirus life cycle. Typically, baculovirus transfer vectors are used to replace the wild-type AcMNPV polyhedrin gene with a heterologous gene of interest. Sequences that flank the polyhedrin gene in the wild-type genome are positioned 5′ and 3′ of the expression cassette on the transfer vectors. Following cotransfection with AcMNPV DNA, a homologous recombination event occurs between these sequences resulting in a recombinant virus carrying the gene of interest and the polyhedrin or p10 promoter. Selection can be based upon visual screening for lacZ fusion activity.

[0240] As yet another example, mammalian cells are often chosen for expression of proteins intended as pharmaceutical agents, and are also chosen as host cells for screening of potential agonist and antagonists of a protein or a physiological pathway.

[0241] Where mammalian cells are chosen as host cells, vectors intended for autonomous extrachromosomal replication will typically include a viral origin, such as the SV40 origin (for replication in cell lines expressing the large T-antigen, such as COS1 and COS7 cells), the papillomavirus origin, or the EBV origin for long term episomal replication (for use, e.g., in 293-EBNA cells, which constitutively express the EBV EBNA-1 gene product and adenovirus E1A). Vectors intended for integration, and thus replication as part of the mammalian chromosome, can, but need not, include an origin of replication functional in mammalian cells, such as the SV40 origin. Vectors based upon viruses, such as adenovirus, adeno-associated virus, vaccinia virus, and various mammalian retroviruses, will typically replicate according to the viral replicative strategy.

[0242] Selectable markers for use in mammalian cells include resistance to neomycin (G418), blasticidin, hygromycin and to zeocin, and selection based upon the purine salvage pathway using HAT medium.

[0243] Plant cells can also be used for expression, with the vector replicon typically derived from a plant virus (e.g., cauliflower mosaic virus, CaMV; tobacco mosaic virus, TMV) and selectable markers chosen for suitability in plants.

[0244] For propagation of nucleic acids of the present invention that are larger than can readily be accomodated in vectors derived from plasmids or virus, the invention further provides artificial chromosomes—BACs, YACs, PACs, and HACs—that comprise PCCP1 nucleic acids, often genomic nucleic acids.

[0245] The BAC system is based on the well-characterized E. coli F-factor, a low copy plasmid that exists in a supercoiled circular form in host cells. The structural features of the F-factor allow stable maintenance of individual human DNA clones as well as easy manipulation of the cloned DNA. See Shizuya et al., Keio J. Med. 50(1):26-30 (2001); Shizuya et al., Proc. Natl. Acad. Sci. USA 89(18):8794-7 (1992).

[0246] YACs are based on yeast linear plasmids, denoted YLp, containing homologous or heterologous DNA sequences that function as telomeres (TEL) in vivo, as well as containing yeast ARS (origins of replication) and CEN (centromeres) segments.

[0247] HACs are human artifical chromosomes. Kuroiwa et al., Nature Biotechnol. 18(10):1086-90 (2000); Henning et al., Proc. Natl. Acad. Sci. USA 96(2):592-7 (1999); Harrington et al., Nature Genet. 15(4):345-55 (1997). In one version, long synthetic arrays of alpha satellite DNA are combined with telomeric DNA and genomic DNA to generate linear microchromosomes that are mitotically and cytogenetically stable in the absence of selection.

[0248] PACs are P1-derived artificial chromosomes. Sternberg, Proc. Natl. Acad. Sci. USA 87(1):103-7 (1990); Sternberg et al., New Biol. 2(2):151-62 (1990); Pierce et al., Proc. Natl. Acad. Sci. USA 89(6):2056-60 (1992).

[0249] Vectors of the present invention will also often include elements that permit in vitro transcription of RNA from the inserted heterologous nucleic acid. Such vectors typically include a phage promoter, such as that from T7, T3, or SP6, flanking the nucleic acid insert. Often two different such promoters flank the inserted nucleic acid, permitting separate in vitro production of both sense and antisense strands.

[0250] Expression vectors of the present invention—that is, those vectors that will drive expression of polypeptides from the inserted heterologous nucleic acid—will often include a variety of other genetic elements operatively linked to the protein-encoding heterologous nucleic acid insert, typically genetic elements that drive transcription, such as promoters and enhancer elements, those that facilitate RNA processing, such as transcription termination and/or polyadenylation signals, and those that facilitate translation, such as ribosomal consensus sequences.

[0251] For example, vectors for expressing proteins of the present invention in prokaryotic cells, typically E. coli, will include a promoter, often a phage promoter, such as phage lambda pL promoter, the trc promoter, a hybrid derived from the trp and lac promoters, the bacteriophage T7 promoter (in E. coli cells engineered to express the T7 polymerase), or the araBAD operon. Often, such prokaryotic expression vectors will further include transcription terminators, such as the aspA terminator, and elements that facilitate translation, such as a consensus ribosome binding site and translation termination codon, Schomer et al., Proc. Natl. Acad. Sci. USA 83:8506-8510 (1986).

[0252] As another example, vectors for expressing proteins of the present invention in yeast cells, typically S. cerevisiae, will include a yeast promoter, such as the CYC1 promoter, the GAL1 promoter, ADH1 promoter, or the GPD promoter, and will typically have elements that facilitate transcription termination, such as the transcription termination signals from the CYC1 or ADH1 gene.

[0253] As another example, vectors for expressing proteins of the present invention in mammalian cells will include a promoter active in mammalian cells. Such promoters are often drawn from mammalian viruses—such as the enhancer-promoter sequences from the immediate early gene of the human cytomegalovirus (CMV), the enhancer-promoter sequences from the Rous sarcoma virus long terminal repeat (RSV LTR), and the enhancer-promoter from SV40. Often, expression is enhanced by incorporation of polyadenylation sites, such as the late SV40 polyadenylation site and the polyadenylation signal and transcription termination sequences from the bovine growth hormone (BGH) gene, and ribosome binding sites. Furthermore, vectors can include introns, such as intron II of rabbit β-globin gene and the SV40 splice elements.

[0254] Vector-drive protein expression can be constitutive or inducible.

[0255] Inducible vectors include either naturally inducible promoters, such as the trc promoter, which is regulated by the lac operon, and the pL promoter, which is regulated by tryptophan, the MMTV-LTR promoter, which is inducible by dexamethasone, or can contain synthetic promoters and/or additional elements that confer inducible control on adjacent promoters. Examples of inducible synthetic promoters are the hybrid Plac/ara-1 promoter and the PLtetO-1 promoter. The PltetO-1 promoter takes advantage of the high expression levels from the PL promoter of phage lambda, but replaces the lambda repressor sites with two copies of operator 2 of the Tn10 tetracycline resistance operon, causing this promoter to be tightly repressed by the Tet repressor protein and induced in response to tetracycline (Tc) and Tc derivatives such as anhydrotetracycline.

[0256] As another example of inducible elements, hormone response elements, such as the glucocorticoid response element (GRE) and the estrogen response element (ERE), can confer hormone inducibility where vectors are used for expression in cells having the respective hormone receptors. To reduce background levels of expression, elements responsive to ecdysone, an insect hormone, can be used instead, with coexpression of the ecdysone receptor.

[0257] Expression vectors can be designed to fuse the expressed polypeptide to small protein tags that facilitate purification and/or visualization.

[0258] For example, proteins of the present invention can be expressed with a polyhistidine tag that facilitates purification of the fusion protein by immobilized metal affinity chromatography, for example using NiNTA resin (Qiagen Inc., Valencia, Calif., USA) or TALON™ resin (cobalt immobilized affinity chromatography medium, Clontech Labs, Palo Alto, Calif., USA). As another example, the fusion protein can include a chitin-binding tag and self-excising intein, permitting chitin-based purification with self-removal of the fused tag (IMPACT™ system, New England Biolabs, Inc., Beverley, Mass., USA). Alternatively, the fusion protein can include a calmodulin-binding peptide tag, permitting purification by calmodulin affinity resin (Stratagene, La Jolla, Calif., USA), or a specifically excisable fragment of the biotin carboxylase carrier protein, permitting purification of in vivo biotinylated protein using an avidin resin and subsequent tag removal (Promega, Madison, Wis., USA). As another useful alternative, the proteins of the present invention can be expressed as a fusion to glutathione-S-transferase, the affinity and specificity of binding to glutathione permitting purification using glutathione affinity resins, such as Glutathione-Superflow Resin (Clontech Laboratories, Palo Alto, Calif., USA), with subsequent elution with free glutathione.

[0259] Other tags include, for example, the Xpress epitope, detectable by anti-Xpress antibody (Invitrogen, Carlsbad, Calif., USA), a myc tag, detectable by anti-myc tag antibody, the V5 epitope, detectable by anti-V5 antibody (Invitrogen, Carlsbad, Calif., USA), FLAG® epitope, detectable by anti-FLAG antibody (Stratagene, La Jolla, Calif., USA), and the HA epitope.

[0260] For secretion of expressed proteins, vectors can include appropriate sequences that encode secretion signals, such as leader peptides. For example, the pSecTag2 vectors (Invitrogen, Carlsbad, Calif., USA) are 5.2 kb mammalian expression vectors that carry the secretion signal from the V-J2-C region of the mouse Ig kappa-chain for efficient secretion of recombinant proteins from a variety of mammalian cell lines.

[0261] Expression vectors can also be designed to fuse proteins encoded by the heterologous nucleic acid insert to polypeptides larger than purification and/or identification tags. Useful protein fusions include those that permit display of the encoded protein on the surface of a phage or cell, fusions to intrinsically fluorescent proteins, such as those that have a green fluorescent protein (GFP)-like chromophore, fusions to the IgG Fc region, and fusions for use in two hybrid systems.

[0262] Vectors for phage display fuse the encoded polypeptide to, e.g., the gene III protein (pIII) or gene VIII protein (pVIII) for display on the surface of filamentous phage, such as M13. See Barbas et al., Phage Display: A Laboratory Manual, Cold Spring Harbor Laboratory Press (2001) (ISBN 0-87969-546-3); Kay et al. (eds.), Phage Display of Peptides and Proteins: A Laboratory Manual, San Diego: Academic Press, Inc., 1996; Abelson et al. (eds.), Combinatorial Chemistry, Methods in Enzymology vol. 267, Academic Press (May 1996).

[0263] Vectors for yeast display, e.g. the pYD1 yeast display vector (Invitrogen, Carlsbad, Calif., USA), use the α-agglutinin yeast adhesion receptor to display recombinant protein on the surface of S. cerevisiae. Vectors for mammalian display, e.g., the pDisplay™ vector (Invitrogen, Carlsbad, Calif., USA), target recombinant proteins using an N-terminal cell surface targeting signal and a C-terminal transmembrane anchoring domain of platelet derived growth factor receptor.

[0264] A wide variety of vectors now exist that fuse proteins encoded by heterologous nucleic acids to the chromophore of the substrate-independent, intrinsically fluorescent green fluorescent protein from Aequorea victoria (“GFP”) and its variants. These proteins are intrinsically fluorescent: the GFP-like chromophore is entirely encoded by its amino acid sequence and can fluoresce without requirement for cofactor or substrate.

[0265] Structurally, the GFP-like chromophore comprises an 11-stranded β-barrel (β-can) with a central α-helix, the central α-helix having a conjugated π-resonance system that includes two aromatic ring systems and the bridge between them. The π-resonance system is created by autocatalytic cyclization among amino acids; cyclization proceeds through an imidazolinone intermediate, with subsequent dehydrogenation by molecular oxygen at the Cα-Cβ bond of a participating tyrosine.

[0266] The GFP-like chromophore can be selected from GFP-like chromophores found in naturally occurring proteins, such as A. victoria GFP (GenBank accession number AAA27721), Renilla reniformis GFP, FP583 (GenBank accession no. AF168419) (DsRed), FP593 (AF272711), FP483 (AF168420), FP484 (AF168424), FP595 (AF246709), FP486 (AF168421), FP538 (AF168423), and FP506 (AF168422), and need include only so much of the native protein as is needed to retain the chromophore's intrinsic fluorescence. Methods for determining the minimal domain required for fluorescence are known in the art. Li et al., “Deletions of the Aequorea victoria Green Fluorescent Protein Define the Minimal Domain Required for Fluorescence,” J. Biol. Chem. 272:28545-28549 (1997).

[0267] Alternatively, the GFP-like chromophore can be selected from GFP-like chromophores modified from those found in nature. Typically, such modifications are made to improve recombinant production in heterologous expression systems (with or without change in protein sequence), to alter the excitation and/or emission spectra of the native protein, to facilitate purification, to facilitate or as a consequence of cloning, or are a fortuitous consequence of research investigation.

[0268] The methods for engineering such modified GFP-like chromophores and testing them for fluorescence activity, both alone and as part of protein fusions, are well-known in the art. Early results of these efforts are reviewed in Heim et al., Curr. Biol. 6:178-182 (1996), incorporated herein by reference in its entirety; a more recent review, with tabulation of useful mutations, is found in Palm et al., “Spectral Variants of Green Fluorescent Protein,” in Green Fluorescent Proteins, Conn (ed.), Methods Enzymol. vol. 302, pp. 378-394 (1999), incorporated herein by reference in its entirety. A variety of such modified chromophores are now commercially available and can readily be used in the fusion proteins of the present invention.

[0269] For example, EGFP (“enhanced GFP”), Cormack et al., Gene 173:33-38 (1996); U.S. Pat. Nos. 6,090,919 and 5,804,387, is a red-shifted, human codon-optimized variant of GFP that has been engineered for brighter fluorescence, higher expression in mammalian cells, and for an excitation spectrum optimized for use in flow cytometers. EGFP can usefully contribute a GFP-like chromophore to the fusion proteins of the present invention. A variety of EGFP vectors, both plasmid and viral, are available commercially (Clontech Labs, Palo Alto, Calif., USA), including vectors for bacterial expression, vectors for N-terminal protein fusion expression, vectors for expression of C-terminal protein fusions, and for bicistronic expression.

[0270] Toward the other end of the emission spectrum, EBFP (“enhanced blue fluorescent protein”) and BFP2 contain four amino acid substitutions that shift the emission from green to blue, enhance the brightness of fluorescence and improve solubility of the protein, Heim et al., Curr. Biol. 6:178-182 (1996); Cormack et al., Gene 173:33-38 (1996). EBFP is optimized for expression in mammalian cells whereas BFP2, which retains the original jellyfish codons, can be expressed in bacteria; as is further discussed below, the host cell of production does not affect the utility of the resulting fusion protein. The GFP-like chromophores from EBFP and BFP2 can usefully be included in the fusion proteins of the present invention, and vectors containing these blue-shifted variants are available from Clontech Labs (Palo Alto, Calif., USA).

[0271] Analogously, EYFP (“enhanced yellow fluorescent protein”), also available from Clontech Labs, contains four amino acid substitutions, different from EBFP, Ormδ et al., Science 273:1392-1395 (1996), that shift the emission from green to yellowish-green. Citrine, an improved yellow fluorescent protein mutant, is described in Heikal et al., Proc. Natl. Acad. Sci. USA 97:11996-12001 (2000). ECFP (“enhanced cyan fluorescent protein”) (Clontech Labs, Palo Alto, Calif., USA) contains six amino acid substitutions, one of which shifts the emission spectrum from green to cyan. Heim et al., Curr. Biol. 6:178-182 (1996); Miyawaki et al., Nature 388:882-887 (1997). The GFP-like chromophore of each of these GFP variants can usefully be included in the fusion proteins of the present invention.

[0272] The GFP-like chromophore can also be drawn from other modified GFPs, including those described in U.S. Pat. Nos. 6,124,128; 6,096,865; 6,090,919; 6,066,476; 6,054,321; 6,027,881; 5,968,750; 5,874,304; 5,804,387; 5,777,079; 5,741,668; and 5,625,048, the disclosures of which are incorporated herein by reference in their entireties. See also Conn (ed.), Green Fluorescent Protein, Methods in Enzymol. Vol. 302, pp 378-394 (1999), incorporated herein by reference in its entirety. A variety of such modified chromophores are now commercially available and can readily be used in the fusion proteins of the present invention.

[0273] Fusions to the IgG Fc region increase serum half life of protein pharmaceutical products through interaction with the FcRn receptor (also denominated the FcRp receptor and the Brambell receptor, FcRb), further described in international patent application nos. WO 97/43316, WO 97/34631, WO 96/32478, WO 96/18412.

[0274] For long-term, high-yield recombinant production of the proteins, protein fusions, and protein fragments of the present invention, stable expression is particularly useful.

[0275] Stable expression is readily achieved by integration into the host cell genome of vectors having selectable markers, followed by selection for integrants.

[0276] For example, the pUB6/V5-His A, B, and C vectors (Invitrogen, Carlsbad, Calif., USA) are designed for high-level stable expression of heterologous proteins in a wide range of mammalian tissue types and cell lines. pUB6/V5-His uses the promoter/enhancer sequence from the human ubiquitin C gene to drive expression of recombinant proteins: expression levels in 293, CHO, and NIH3T3 cells are comparable to levels from the CMV and human EF-1a promoters. The bsd gene permits rapid selection of stably transfected mammalian cells with the potent antibiotic blasticidin.

[0277] Replication incompetent retroviral vectors, typically derived from Moloney murine leukemia virus, prove particularly useful for creating stable transfectants having integrated provirus. The highly efficient transduction machinery of retroviruses, coupled with the availability of a variety of packaging cell lines—such as RetroPack™ PT 67, EcoPack2™-293, AmphoPack-293, GP2-293 cell lines (all available from Clontech Laboratories, Palo Alto, Calif., USA)—allow a wide host range to be infected with high efficiency; varying the multiplicity of infection readily adjusts the copy number of the integrated provirus. Retroviral vectors are available with a variety of selectable markers, such as resistance to neomycin, hygromycin, and puromycin, permitting ready selection of stable integrants.

[0278] The present invention further includes host cells comprising the vectors of the present invention, either present episomally within the cell or integrated, in whole or in part, into the host cell chromosome.

[0279] Among other considerations, some of which are described above, a host cell strain may be chosen for its ability to process the expressed protein in the desired fashion. Such post-translational modifications of the polypeptide include, but are not limited to, acetylation, carboxylation, glycosylation, phosphorylation, lipidation, and acylation, and it is an aspect of the present invention to provide PCCP1 proteins with such post-translational modifications.

[0280] As noted earlier, host cells can be prokaryotic or eukaryotic. Representative examples of appropriate host cells include, but are not limited to, bacterial cells, such as E. coli, Caulobacter crescentus, Streptomyces species, and Salmonella typhimurium; yeast cells, such as Saccharomyces cerevisiae, Schizosaccharomyces pombe, Pichia pastoris, Pichia methanolica; insect cell lines, such as those from Spodoptera frugiperda—e.g., Sf9 and Sf21 cell lines, and expresSF™ cells (Protein Sciences Corp., Meriden, Conn., USA)—Drosophila S2 cells, and Trichoplusia ni High Five® Cells (Invitrogen, Carlsbad, Calif., USA); and mammalian cells. Typical mammalian cells include COS1 and COS7 cells, chinese hamster ovary (CHO) cells, NIH 3T3 cells, 293 cells, HEPG2 cells, HeLa cells, L cells, murine ES cell lines (e.g., from strains 129/SV, C57/BL6, DBA-1, 129/SVJ), K562, Jurkat cells, and BW5147. Other mammalian cell lines are well known and readily available from the American Type Culture Collection (ATCC) (Manassas, Va., USA) and the National Institute of General medical Sciences (NIGMS) Human Genetic Cell Repository at the Coriell Cell Repositories (Camden, N.J., USA).

[0281] Methods for introducing the vectors and nucleic acids of the present invention into the host cells are well known in the art; the choice of technique will depend primarily upon the specific vector to be introduced and the host cell chosen.

[0282] For example, phage lambda vectors will typically be packaged using a packaging extract (e.g., Gigapack® packaging extract, Stratagene, La Jolla, Calif., USA), and the packaged virus used to infect E. coli. Plasmid vectors will typically be introduced into chemically competent or electrocompetent bacterial cells.

[0283] E. coli cells can be rendered chemically competent by treatment, e.g., with CaCl₂, or a solution of Mg²⁺, Mn²⁺, Ca²⁺, Rb⁺ or K⁺, dimethyl sulfoxide, dithiothreitol, and hexamine cobalt (III), Hanahan, J. Mol. Biol. 166(4):557-80 (1983), and vectors introduced by heat shock. A wide variety of chemically competent strains are also available commercially (e.g., Epicurian Coli® XL10-Gold® Ultracompetent Cells (Stratagene, La Jolla, Calif., USA); DH5α competent cells (Clontech Laboratories, Palo Alto, Calif., USA); TOP10 Chemically Competent E. coli Kit (Invitrogen, Carlsbad, Calif., USA)).

[0284] Bacterial cells can be rendered electrocompetent—that is, competent to take up exogenous DNA by electroporation—by various pre-pulse treatments; vectors are introduced by electroporation followed by subsequent outgrowth in selected media. An extensive series of protocols is provided online in Electroprotocols (BioRad, Richmond, Calif., USA) (http://www.bio-rad.com/LifeScience/pdf/New_Gene_Pulser.pdf).

[0285] Vectors can be introduced into yeast cells by spheroplasting, treatment with lithium salts, electroporation, or protoplast fusion.

[0286] Spheroplasts are prepared by the action of hydrolytic enzymes—a snail-gut extract, usually denoted Glusulase, or Zymolyase, an enzyme from Arthrobacter luteus—to remove portions of the cell wall in the presence of osmotic stabilizers, typically 1 M sorbitol. DNA is added to the spheroplasts, and the mixture is co-precipitated with a solution of polyethylene glycol (PEG) and Ca²⁺. Subsequently, the cells are resuspended in a solution of sorbitol, mixed with molten agar and then layered on the surface of a selective plate containing sorbitol. For lithium-mediated transformation, yeast cells are treated with lithium acetate, which apparently permeabilizes the cell wall, DNA is added and the cells are co-precipitated with PEG. The cells are exposed to a brief heat shock, washed free of PEG and lithium acetate, and subsequently spread on plates containing ordinary selective medium. Increased frequencies of transformation are obtained by using specially-prepared single-stranded carrier DNA and certain organic solvents. Schiestl et al., Curr. Genet. 16(5-6):339-46 (1989). For electroporation, freshly-grown yeast cultures are typically washed, suspended in an osmotic protectant, such as sorbitol, mixed with DNA, and the cell suspension pulsed in an electroporation device. Subsequently, the cells are spread on the surface of plates containing selective media. Becker et al., Methods Enzymol. 194:182-7 (1991). The efficiency of transformation by electroporation can be increased over 100-fold by using PEG, single-stranded carrier DNA and cells that are in late log-phase of growth. Larger constructs, such as YACs, can be introduced by protoplast fusion.

[0287] Mammalian and insect cells can be directly infected by packaged viral vectors, or transfected by chemical or electrical means.

[0288] For chemical transfection, DNA can be coprecipitated with CaPO₄ or introduced using liposomal and nonliposomal lipid-based agents. Commercial kits are available for CaPO₄ transfection (CalPhos™ Mammalian Transfection Kit, Clontech Laboratories, Palo Alto, Calif., USA), and lipid-mediated transfection can be practiced using commercial reagents, such as LIPOFECTAMINE™ 2000, LIPOFECTAMINE™ Reagent, CELLFECTIN® Reagent, and LIPOFECTIN® Reagent (Invitrogen, Carlsbad, Calif., USA), DOTAP Liposomal Transfection Reagent, FuGENE 6, X-tremeGENE Q2, DOSPER, (Roche Molecular Biochemicals, Indianapolis, Ind. USA), Effectene™, PolyFect®, Superfect® (Qiagen, Inc., Valencia, Calif., USA). Protocols for electroporating mammalian cells can be found online in Electroprotocols (Bio-Rad, Richmond, Calif., USA) (http://www.bio-rad.com/LifeScience/pdf/New_Gene_Pulser.pdf). See also, Norton et al. (eds.), Gene Transfer Methods: Introducing DNA into Living Cells and Organisms, BioTechniques Books, Eaton Publishing Co. (2000) (ISBN 1-881299-34-1), incorporated herein by reference in its entirety.

[0289] Other transfection techniques include transfection by particle embardment. See, e.g., Cheng et al., Proc. Natl. Acad. Sci. USA 90(10):4455-9 (1993); Yang et al., Proc. Natl. Acad. Sci. USA 87(24):9568-72 (1990).

[0290] Proteins

[0291] In another aspect, the present invention provides PCCP1 proteins, various fragments thereof suitable for use as antigens (e.g., for epitope mapping) and for use as immunogens (e.g., for raising antibodies or as vaccines), fusions of PCCP1 polypeptides and fragments to heterologous polypeptides, and conjugates of the proteins, fragments, and fusions of the present invention to other moieties (e.g., to carrier proteins, to fluorophores).

[0292] FIG. 3 presents the predicted amino acid sequences encoded by the PCCP1 cDNA clone. The amino acid sequence is further presented in SEQ ID NO: 3.

[0293] Unless otherwise indicated, amino acid sequences of the proteins of the present invention were determined as a predicted translation from a nucleic acid sequence. Accordingly, any amino acid sequence presented herein may contain errors due to errors in the nucleic acid sequence, as described in detail above. Furthermore, single nucleotide polymorphisms (SNPs) occur frequently in eukaryotic genomes—more than 1.4 million SNPs have already identified in the human genome, International Human Genome Sequencing Consortium, Nature 409:860-921 (2001)— and the sequence determined from one individual of a species may differ from other allelic forms present within the population. Small deletions and insertions can often be found that do not alter the function of the protein.

[0294] Accordingly, it is an aspect of the present invention to provide proteins not only identical in sequence to those described with particularity herein, but also to provide isolated proteins at least about 65% identical in sequence to those described with particularity herein, typically at least about 70%, 75%, 80%, 85%, or 90% identical in sequence to those described with particularity herein, usefully at least about 91%, 92%, 93%, 94%, or 95% identical in sequence to those described with particularity herein, usefully at least about 96%, 97%, 98%, or 99% identical in sequence to those described with particularity herein, and, most conservatively, at least about 99.5%, 99.6%, 99.7%, 99.8% and 99.9% identical in sequence to those described with particularity herein. These sequence variants can be naturally occurring or can result from human intervention by way of random or directed mutagenesis.

[0295] For purposes herein, percent identity of two amino acid sequences is determined using the procedure of Tatiana et al., “Blast 2 sequences—a new tool for comparing protein and nucleotide sequences”, FEMS Microbiol Lett. 174:247-250 (1999), which procedure is effectuated by the computer program BLAST 2 SEQUENCES, available online at

[0296] http://www.ncbi.nlm.nih.gov/blast/bl2seq/bl2.html,

[0297] To assess percent identity of amino acid sequences, the BLASTP module of BLAST 2 SEQUENCES is used with default values of (i) BLOSUM62 matrix, Henikoff et al., Proc. Natl. Acad. Sci USA 89(22):10915-9 (1992); (ii) open gap 11 and extension gap 1 penalties; and (iii) gap x_dropoff 50 expect 10 word size 3 filter, and both sequences are entered in their entireties.

[0298] As is well known, amino acid substitutions occur frequently among natural allelic variants, with conservative substitutions often occasioning only de minimis change in protein function.

[0299] Accordingly, it is an aspect of the present invention to provide proteins not only identical in sequence to those described with particularity herein, but also to provide isolated proteins having the sequence of PCCP1 proteins, or portions thereof, with conservative amino acid substitutions. It is a further aspect to provide isolated proteins having the sequence of PCCP1 proteins, and portions thereof, with moderately conservative amino acid substitutions. These conservatively-substituted and moderately conservatively-substituted variants can be naturally occurring or can result from human intervention.

[0300] Although there are a variety of metrics for calling conservative amino acid substitutions, based primarily on either observed changes among evolutionarily related proteins or on predicted chemical similarity, for purposes herein a conservative replacement is any change having a positive value in the PAM250 log-likelihood matrix reproduced herein below (see Gonnet et al., Science 256(5062):1443-5 (1992)):

| | A | R | N | D | C | Q | E | G | H | I | L | K | M | F | P | S | T | W | Y | V |
|---|---|---|---|---|---|---|---|---|---|---|---|---|---|---|---|---|---|---|---|---|
| A | 2 | −1 | 0 | 0 | 0 | 0 | 0 | 0 | −1 | −1 | −1 | 0 | −1 | −2 | 0 | 1 | 1 | −4 | −2 | 0 |
| R | −1 | 5 | 0 | 0 | −2 | 2 | 0 | −1 | 1 | −2 | −2 | 3 | −2 | −3 | −1 | 0 | 0 | −2 | −2 | −2 |
| N | 0 | 0 | 4 | 2 | −2 | 1 | 1 | 0 | 1 | −3 | −3 | 1 | −2 | −3 | −1 | 1 | 0 | −4 | −1 | −2 |
| D | 0 | 0 | 2 | 5 | −3 | 1 | 3 | 0 | 0 | −4 | −4 | 0 | −3 | −4 | −1 | 0 | 0 | −5 | −3 | −3 |
| C | 0 | −2 | −2 | −3 | 12 | −2 | −3 | −2 | −1 | −1 | −2 | −3 | −1 | −1 | −3 | 0 | 0 | −1 | 0 | 0 |
| Q | 0 | 2 | 1 | 1 | −2 | 3 | 2 | −1 | 1 | −2 | −2 | 2 | −1 | −3 | 0 | 0 | 0 | −3 | −2 | −2 |
| E | 0 | 0 | 1 | 3 | −3 | 2 | 4 | −1 | 0 | −3 | −3 | 1 | −2 | −4 | 0 | 0 | 0 | −4 | −3 | −2 |
| G | 0 | −1 | 0 | 0 | −2 | −1 | −1 | 7 | −1 | −4 | −4 | −1 | −4 | −5 | −2 | 0 | −1 | −4 | −4 | −3 |
| H | −1 | 1 | 1 | 0 | −1 | 1 | 0 | −1 | 6 | −2 | −2 | 1 | −1 | 0 | −1 | 0 | 0 | −1 | 2 | −2 |
| I | −1 | −2 | −3 | −4 | −1 | −2 | −3 | −4 | −2 | 4 | 3 | −2 | 2 | 1 | −3 | −2 | −1 | −2 | −1 | 3 |
| L | −1 | −2 | −3 | −4 | −2 | −2 | −3 | −4 | −2 | 3 | 4 | −2 | 3 | 2 | −2 | −2 | −1 | −1 | 0 | 2 |
| K | 0 | 3 | 1 | 0 | −3 | 2 | 1 | −1 | 1 | −2 | −2 | 3 | −1 | −3 | −1 | 0 | 0 | −4 | −2 | −2 |
| M | −1 | −2 | −2 | −3 | −1 | −1 | −2 | −4 | −1 | 2 | 3 | −1 | 4 | 2 | −2 | −1 | −1 | −1 | 0 | 2 |
| F | −2 | −3 | −3 | −4 | −1 | −3 | −4 | −5 | 0 | 1 | 2 | −3 | 2 | 7 | −4 | −3 | −2 | 4 | 5 | 0 |
| P | 0 | −1 | −1 | −1 | −3 | 0 | 0 | −2 | −1 | −3 | −2 | −1 | −2 | −4 | 8 | 0 | 0 | −5 | −3 | −2 |
| S | 1 | 0 | 1 | 0 | 0 | 0 | 0 | 0 | 0 | −2 | −2 | 0 | −1 | −3 | 0 | 2 | 2 | −3 | −2 | −1 |
| T | 1 | 0 | 0 | 0 | 0 | 0 | 0 | −1 | 0 | −1 | −1 | 0 | −1 | −2 | 0 | 2 | 2 | −4 | −2 | 0 |
| W | −4 | −2 | −4 | −5 | −1 | −3 | −4 | −4 | −1 | −2 | −1 | −4 | −1 | 4 | −5 | −3 | −4 | 14 | 4 | −3 |
| Y | −2 | −2 | −1 | −3 | 0 | −2 | −3 | −4 | 2 | −1 | 0 | −2 | 0 | 5 | −3 | −2 | −2 | 4 | 8 | −1 |
| V | 0 | −2 | −2 | −3 | 0 | −2 | −2 | −3 | −2 | 3 | 2 | −2 | 2 | 0 | −2 | −1 | 0 | −3 | −1 | 3 |

[0301] For purposes herein, a “moderately conservative” replacement is any change having a nonnegative value in the PAM250 log-likelihood matrix reproduced herein above.

[0302] As is also well known in the art, relatedness of proteins can also be characterized using a functional test, the ability of the encoding nucleic acids to base-pair to one another at defined hybridization stringencies.

[0303] It is, therefore, another aspect of the invention to provide isolated proteins not only identical in sequence to those described with particularity herein, but also to provide isolated proteins (“hybridization related proteins”) that are encoded by nucleic acids that hybridize under high stringency conditions (as defined herein above) to all or to a portion of various of the isolated nucleic acids of the present invention (“reference nucleic acids”). It is a further aspect of the invention to provide isolated proteins (“hybridization related proteins”) that are encoded by nucleic acids that hybridize under moderate stringency conditions (as defined herein above) to all or to a portion of various of the isolated nucleic acids of the present invention (“reference nucleic acids”).

[0304] The hybridization related proteins can be alternative isoforms, homologues, paralogues, and orthologues of the PCCP1 protein of the present invention. Particularly useful orthologues are those from other primate species, such as chimpanzee, rhesus macaque monkey, baboon, orangutan, and gorilla, from rodents, such as rats, mice, guinea pigs; from lagomorphs, such as rabbits, and from domestic livestock, such as cow, pig, sheep, horse, and goat.

[0305] Relatedness of proteins can also be characterized using a second functional test, the ability of a first protein competitively to inhibit the binding of a second protein to an antibody.

[0306] It is, therefore, another aspect of the present invention to provide isolated proteins not only identical in sequence to those described with particularity herein, but also to provide isolated proteins (“cross-reactive proteins”) that competitively inhibit the binding of antibodies to all or to a portion of various of the isolated PCCP1 proteins of the present invention (“reference proteins”). Such competitive inhibition can readily be determined using immunoassays well known in the art.

[0307] Among the proteins of the present invention that differ in amino acid sequence from those described with particularity herein—including those that have deletions and insertions causing up to 10% non-identity, those having conservative or moderately conservative substitutions, hybridization related proteins, and cross-reactive proteins—those that substantially retain one or more PCCP1 activities are particularly useful. As described above, those activities include tumor suppressor activity.

[0308] Residues that are tolerant of change while retaining function can be identified by altering the protein at known residues using methods known in the art, such as alanine scanning mutagenesis, Cunningham et al., Science 244(4908):1081-5 (1989); transposon linker scanning mutagenesis, Chen et al., Gene 263(1-2):39-48 (2001); combinations of homolog- and alanine-scanning mutagenesis, Jin et al., J. Mol. Biol. 226(3):851-65 (1992); combinatorial alanine scanning, Weiss et al., Proc. Natl. Acad. Sci USA 97(16):8950-4 (2000), followed by functional assay. Transposon linker scanning kits are available commercially (New England Biolabs, Beverly, Mass., USA, catalog. no. E7-102S; EZ::TN™ In-Frame Linker Insertion Kit, catalogue no. EZI04KN, Epicentre Technologies Corporation, Madison, Wis., USA).

[0309] As further described below, the isolated proteins of the present invention can readily be used as specific immunogens to raise antibodies that specifically recognize PCCP1 proteins, their isoforms, homologues, paralogues, and/or orthologues. The antibodies, in turn, can be used, inter alia, specifically to assay for the PCCP1 proteins of the present invention—e.g. by ELISA for detection of protein fluid samples, such as serum, by immunohistochemistry or laser scanning cytometry, for detection of protein in tissue samples, or by flow cytometry, for detection of intracellular protein in cell suspensions—for specific antibody-mediated isolation and/or purification of PCCP1 proteins, as for example by immunoprecipitation, and for use as specific agonists or antagonists of PCCP1 action.

[0310] The isolated proteins of the present invention are also immediately available for use as specific standards in assays used to determine the concentration and/or amount specifically of the PCCP1 proteins of the present invention. As is well known, ELISA kits for detection and quantitation of protein analytes typically include isolated and purified protein of known concentration for use as a measurement standard (e.g., the human interferon-γ OptEIA kit, catalog no. 555142, Pharmingen, San Diego, Calif., USA includes human recombinant gamma interferon, baculovirus produced).

[0311] The isolated proteins of the present invention are also immediately available for use as specific biomolecule capture probes for surface-enhanced laser desorption ionization (SELDI) detection of protein-protein interactions, WO 98/59362; WO 98/59360; WO 98/59361; and Merchant et al., Electrophoresis 21(6):1164-77 (2000), the disclosures of which are incorporated herein by reference in their entireties. Analogously, the isolated proteins of the present invention are also immediately available for use as specific biomolecule capture probes on BIACORE surface plasmon resonance probes. See Weinberger et al., Pharmacogenomics 1(4):395-416 (2000); Malmqvist, Biochem. Soc. Trans. 27(2):335-40 (1999).

[0312] The isolated proteins of the present invention are also useful as a therapeutic supplement in patients having a specific deficiency in PCCP1 production.

[0313] In another aspect, the invention also provides fragments of various of the proteins of the present invention. The protein fragments are useful, inter alia, as antigenic and immunogenic fragments of PCCP1.

[0314] By “fragments” of a protein is here intended isolated proteins (equally, polypeptides, peptides, oligopeptides), however obtained, that have an amino acid sequence identical to a portion of the reference amino acid sequence, which portion is at least 6 amino acids and less than the entirety of the reference nucleic acid. As so defined, “fragments” need not be obtained by physical fragmentation of the reference protein, although such provenance is not thereby precluded.

[0315] Fragments of at least 6 contiguous amino acids are useful in mapping B cell and T cell epitopes of the reference protein. See, e.g., Geysen et al., “Use of peptide synthesis to probe viral antigens for epitopes to a resolution of a single amino acid,” Proc. Natl. Acad. Sci. USA 81:3998-4002 (1984) and U.S. Pat. Nos. 4,708,871 and 5,595,915, the disclosures of which are incorporated herein by reference in their entireties. Because the fragment need not itself be immunogenic, part of an immunodominant epitope, nor even recognized by native antibody, to be useful in such epitope mapping, all fragments of at least 6 amino acids of the proteins of the present invention have utility in such a study.

[0316] Fragments of at least 8 contiguous amino acids, often at least 15 contiguous amino acids, have utility as immunogens for raising antibodies that recognize the proteins of the present invention. See, e.g., Lerner, “Tapping the immunological repertoire to produce antibodies of predetermined specificity,” Nature 299:592-596 (1982); Shinnick et al., “Synthetic peptide immunogens as vaccines,” Annu. Rev. Microbiol. 37:425-46 (1983); Sutcliffe et al., “Antibodies that react with predetermined sites on proteins,” Science 219:660-6 (1983), the disclosures of which are incorporated herein by reference in their entireties. As further described in the above-cited references, virtually all 8-mers, conjugated to a carrier, such as a protein, prove immunogenic—that is, prove capable of eliciting antibody for the conjugated peptide; accordingly, all fragments of at least 8 amino acids of the proteins of the present invention have utility as immunogens.

[0317] Fragments of at least 8, 9, 10 or 12 contiguous amino acids are also useful as competitive inhibitors of binding of the entire protein, or a portion thereof, to antibodies (as in epitope mapping), and to natural binding partners, such as subunits in a multimeric complex or to receptors or ligands of the subject protein; this competitive inhibition permits identification and separation of molecules that bind specifically to the protein of interest, U.S. Pat. Nos. 5,539,084 and 5,783,674, incorporated herein by reference in their entireties.

[0318] The protein, or protein fragment, of the present invention is thus at least 6 amino acids in length, typically at least 8, 9, 10 or 12 amino acids in length, and often at least 15 amino acids in length. Often, the protein or the present invention, or fragment thereof, is at least 20 amino acids in length, even 25 amino acids, 30 amino acids, 35 amino acids, or 50 amino acids or more in length. Of course, larger fragments having at least 75 amino acids, 100 amino acids, or even 150 amino acids are also useful, and at times preferred.

[0319] The present invention further provides fusions of each of the proteins and protein fragments of the present invention to heterologous polypeptides.

[0320] By fusion is here intended that the protein or protein fragment of the present invention is linearly contiguous to the heterologous polypeptide in a peptide-bonded polymer of amino acids or amino acid analogues; by “heterologous polypeptide” is here intended a polypeptide that does not naturally occur in contiguity with the protein or protein fragment of the present invention. As so defined, the fusion can consist entirely of a plurality of fragments of the PCCP1 protein in altered arrangement; in such case, any of the PCCP1 fragments can be considered heterologous to the other PCCP1 fragments in the fusion protein. More typically, however, the heterologous polypeptide is not drawn from the PCCP1 protein itself.

[0321] The fusion proteins of the present invention will include at least one fragment of the protein of the present invention, which fragment is at least 6, typically at least 8, often at least 15, and usefully at least 16, 17, 18, 19, or 20 amino acids long. The fragment of the protein of the present to be included in the fusion can usefully be at least 25 amino acids long, at least 50 amino acids long, and can be at least 75, 100, or even 150 amino acids long. Fusions that include the entirety of the proteins of the present invention have particular utility.

[0322] The heterologous polypeptide included within the fusion protein of the present invention is at least 6 amino acids in length, often at least 8 amino acids in length, and usefully at least 15, 20, and 25 amino acids in length. Fusions that include larger polypeptides, such as the IgG Fc region, and even entire proteins (such as GFP chromophore-containing proteins), have particular utility.

[0323] As described above in the description of vectors and expression vectors of the present invention, which discussion is incorporated herein by reference in its entirety, heterologous polypeptides to be included in the fusion proteins of the present invention can usefully include those designed to facilitate purification and/or visualization of recombinantly-expressed proteins. Although purification tags can also be incorporated into fusions that are chemically synthesized, chemical synthesis typically provides sufficient purity that further purification by HPLC suffices; however, visualization tags as above described retain their utility even when the protein is produced by chemical synthesis, and when so included render the fusion proteins of the present invention useful as directly detectable markers of PCCP1 presence.

[0324] As also discussed above, heterologous polypeptides to be included in the fusion proteins of the present invention can usefully include those that facilitate secretion of recombinantly expressed proteins—into the periplasmic space or extracellular milieu for prokaryotic hosts, into the culture medium for eukaryotic cells—through incorporation of secretion signals and/or leader sequences.

[0325] Other useful protein fusions of the present invention include those that permit use of the protein of the present invention as bait in a yeast two-hybrid system. See Bartel et al. (eds.), The Yeast Two-Hybrid System, Oxford University Press (1997) (ISBN: 0195109384); Zhu et al., Yeast Hybrid Technologies, Eaton Publishing, (2000) (ISBN 1-881299-15-5); Fields et al., Trends Genet. 10(8):286-92 (1994); Mendelsohn et al., Curr. Opin. Biotechnol. 5(5):482-6 (1994); Luban et al., Curr. Opin. Biotechnol. 6(1):59-64 (1995); Allen et al., Trends Biochem. Sci. 20(12):511-6 (1995); Drees, Curr. Opin. Chem. Biol. 3(1):64-70 (1999); Topcu et al., Pharm. Res. 17(9):1049-55 (2000); Fashena et al., Gene 250(1-2):1-14 (2000), the disclosures of which are incorporated herein by reference in their entireties. Typically, such fusion is to either E. coli LexA or yeast GAL4 DNA binding domains. Related bait plasmids are available that express the bait fused to a nuclear localization signal.

[0326] Other useful protein fusions include those that permit display of the encoded protein on the surface of a phage or cell, fusions to intrinsically fluorescent proteins, such as green fluorescent protein (GFP), and fusions to the IgG Fc region, as described above, which discussion is incorporated here by reference in its entirety.

[0327] The proteins and protein fragments of the present invention can also usefully be fused to protein toxins, such as Pseudomonas exotoxin A, diphtheria toxin, shiga toxin A, anthrax toxin lethal factor, ricin, in order to effect ablation of cells that bind or take up the proteins of the present invention.

[0328] The isolated proteins, protein fragments, and protein fusions of the present invention can be composed of natural amino acids linked by native peptide bonds, or can contain any or all of nonnatural amino acid analogues, normative bonds, and post-synthetic (post translational) modifications, either throughout the length of the protein or localized to one or more portions thereof.

[0329] As is well known in the art, when the isolated protein is used, e.g., for epitope mapping, the range of such nonnatural analogues, normative inter-residue bonds, or post-synthesis modifications will be limited to those that permit binding of the peptide to antibodies. When used as an immunogen for the preparation of antibodies in a non-human host, such as a mouse, the range of such nonnatural analogues, normative inter-residue bonds, or post-synthesis modifications will be limited to those that do not interfere with the immunogenicity of the protein. When the isolated protein is used as a therapeutic agent, such as a vaccine or for replacement therapy, the range of such changes will be limited to those that do not confer toxicity upon the isolated protein.

[0330] Non-natural amino acids can be incorporated during solid phase chemical synthesis or by recombinant techniques, although the former is typically more common.

[0331] Solid phase chemical synthesis of peptides is well established in the art. Procedures are described, inter alia, in Chan et al. (eds.), Fmoc Solid Phase Peptide Synthesis: A Practical Approach (Practical Approach Series), Oxford Univ. Press (March 2000) (ISBN: 0199637245); Jones, Amino Acid and Peptide Synthesis (Oxford Chemistry Primers, No 7), Oxford Univ. Press (August 1992) (ISBN: 0198556683); and Bodanszky, Principles of Peptide Synthesis (Springer Laboratory), Springer Verlag (December 1993) (ISBN: 0387564314), the disclosures of which are incorporated herein by reference in their entireties.

[0332] For example, D-enantiomers of natural amino acids can readily be incorporated during chemical peptide synthesis: peptides assembled from D-amino acids are more resistant to proteolytic attack; incorporation of D-enantiomers can also be used to confer specific three dimensional conformations on the peptide. Other amino acid analogues commonly added during chemical synthesis include ornithine, norleucine, phosphorylated amino acids (typically phosphoserine, phosphothreonine, phosphotyrosine), L-malonyltyrosine, a non-hydrolyzable analog of phosphotyrosine (Kole et al., Biochem. Biophys. Res. Com. 209:817-821 (1995)), and various halogenated phenylalanine derivatives.

[0333] Amino acid analogues having detectable labels are also usefully incorporated during synthesis to provide a labeled polypeptide.

[0334] Biotin, for example (indirectly detectable through interaction with avidin, streptavidin, neutravidin, captavidin, or anti-biotin antibody), can be added using biotinoyl--(9-fluorenylmethoxycarbonyl)-L-lysine (FMOC biocytin) (Molecular Probes, Eugene, Oreg., USA). (Biotin can also be added enzymatically by incorporation into a fusion protein of a E. coli BirA substrate peptide.)

[0335] The FMOC and tBOC derivatives of dabcyl-L-lysine (Molecular Probes, Inc., Eugene, Oreg., USA) can be used to incorporate the dabcyl chromophore at selected sites in the peptide sequence during synthesis. The aminonaphthalene derivative EDANS, the most common fluorophore for pairing with the dabcyl quencher in fluorescence resonance energy transfer (FRET) systems, can be introduced during automated synthesis of peptides by using EDANS--FMOC-L-glutamic acid or the corresponding tBOC derivative (both from Molecular Probes, Inc., Eugene, Oreg., USA). Tetramethylrhodamine fluorophores can be incorporated during automated FMOC synthesis of peptides using (FMOC)--TMR-L-lysine (Molecular Probes, Inc. Eugene, Oreg., USA).

[0336] Other useful amino acid analogues that can be incorporated during chemical synthesis include aspartic acid, glutamic acid, lysine, and tyrosine analogues having allyl side-chain protection (Applied Biosystems, Inc., Foster City, Calif., USA); the allyl side chain permits synthesis of cyclic, branched-chain, sulfonated, glycosylated, and phosphorylated peptides.

[0337] A large number of other FMOC-protected non-natural amino acid analogues capable of incorporation during chemical synthesis are available commercially, including, e.g., Fmoc-2-aminobicyclo[2.2.1]heptane-2-carboxylic acid, Fmoc-3-endo-aminobicyclo[2.2.1]heptane-2-endo-carboxylic acid, Fmoc-3-exo-aminobicyclo[2.2.1]heptane-2-exo-carboxylic acid, Fmoc-3-endo-amino-bicyclo[2.2.1]hept-5-ene-2-endo-carboxylic acid, Fmoc-3-exo-amino-bicyclo[2.2.1]hept-5-ene-2-exo-carboxylic acid, Fmoc-cis-2-amino-1-cyclohexanecarboxylic acid, Fmoc-trans-2-amino-1-cyclohexanecarboxylic acid, Fmoc-1-amino-1-cyclopentanecarboxylic acid, Fmoc-cis-2-amino-1-cyclopentanecarboxylic acid, Fmoc-1-amino-1-cyclopropanecarboxylic acid, Fmoc-D-2-amino-4-(ethylthio)butyric acid, Fmoc-L-2-amino-4-(ethylthio)butyric acid, Fmoc-L-buthionine, Fmoc-S-methyl-L-Cysteine, Fmoc-2-aminobenzoic acid (anthranillic acid), Fmoc-3-aminobenzoic acid, Fmoc-4-aminobenzoic acid, Fmoc-2-aminobenzophenone-2′-carboxylic acid, Fmoc-N-(4-aminobenzoyl)-b-alanine, Fmoc-2-amino-4,5-dimethoxybenzoic acid, Fmoc-4-aminohippuric acid, Fmoc-2-amino-3-hydroxybenzoic acid, Fmoc-2-amino-5-hydroxybenzoic acid, Fmoc-3-amino-4-hydroxybenzoic acid, Fmoc-4-amino-3-hydroxybenzoic acid, Fmoc-4-amino-2-hydroxybenzoic acid, Fmoc-5-amino-2-hydroxybenzoic acid, Fmoc-2-amino-3-methoxybenzoic acid, Fmoc-4-amino-3-methoxybenzoic acid, Fmoc-2-amino-3-methylbenzoic acid, Fmoc-2-amino-5-methylbenzoic acid, Fmoc-2-amino-6-methylbenzoic acid, Fmoc-3-amino-2-methylbenzoic acid, Fmoc-3-amino-4-methylbenzoic acid, Fmoc-4-amino-3-methylbenzoic acid, Fmoc-3-amino-2-naphtoic acid, Fmoc-D,L-3-amino-3-phenylpropionic acid, Fmoc-L-Methyldopa, Fmoc-2-amino-4,6-dimethyl-3-pyridinecarboxylic acid, Fmoc-D,L-?-amino-2-thiophenacetic acid, Fmoc-4-(carboxymethyl)piperazine, Fmoc-4-carboxypiperazine, Fmoc-4-(carboxymethyl)homopiperazine, Fmoc-4-phenyl-4-piperidinecarboxylic acid, Fmoc-L-1,2,3,4-tetrahydronorharman-3-carboxylic acid, Fmoc-L-thiazolidine-4-carboxylic acid, all available from The Peptide Laboratory (Richmond, Calif., USA).

[0338] Non-natural residues can also be added biosynthetically by engineering a suppressor tRNA, typically one that recognizes the UAG stop codon, by chemical aminoacylation with the desired unnatural amino acid and. Conventional site-directed mutagenesis is used to introduce the chosen stop codon UAG at the site of interest in the protein gene. When the acylated suppressor tRNA and the mutant gene are combined in an in vitro transcription/translation system, the unnatural amino acid is incorporated in response to the UAG codon to give a protein containing that amino acid at the specified position. Liu et al., Proc. Natl. Acad. Sci. USA 96(9):4780-5 (1999); Wang et al., Science 292(5516):498-500 (2001).

[0339] The isolated proteins, protein fragments and fusion proteins of the present invention can also include normative inter-residue bonds, including bonds that lead to circular and branched forms.

[0340] The isolated proteins and protein fragments of the present invention can also include post-translational and post-synthetic modifications, either throughout the length of the protein or localized to one or more portions thereof.

[0341] For example, when produced by recombinant expression in eukaryotic cells, the isolated proteins, fragments, and fusion proteins of the present invention will typically include N-linked and/or O-linked glycosylation, the pattern of which will reflect both the availability of glycosylation sites on the protein sequence and the identity of the host cell. Further modification of glycosylation pattern can be performed enzymatically.

[0342] As another example, recombinant polypeptides of the invention may also include an initial modified methionine residue, in some cases resulting from host-mediated processes.

[0343] When the proteins, protein fragments, and protein fusions of the present invention are produced by chemical synthesis, post-synthetic modification can be performed before deprotection and cleavage from the resin or after deprotection and cleavage. Modification before deprotection and cleavage of the synthesized protein often allows greater control, e.g. by allowing targeting of the modifying moiety to the N-terminus of a resin-bound synthetic peptide.

[0344] Useful post-synthetic (and post-translational) modifications include conjugation to detectable labels, such as fluorophores.

[0345] A wide variety of amine-reactive and thiol-reactive fluorophore derivatives have been synthesized that react under nondenaturing conditions with N-terminal amino groups and epsilon amino groups of lysine residues, on the one hand, and with free thiol groups of cysteine residues, on the other.

[0346] Kits are available commercially that permit conjugation of proteins to a variety of amine-reactive or thiol-reactive fluorophores: Molecular Probes, Inc. (Eugene, Oreg., USA), e.g., offers kits for conjugating proteins to Alexa Fluor 350, Alexa Fluor 430, Fluorescein-EX, Alexa Fluor 488, Oregon Green 488, Alexa Fluor 532, Alexa Fluor 546, Alexa Fluor 546, Alexa Fluor 568, Alexa Fluor 594, and Texas Red-X.

[0347] A wide variety of other amine-reactive and thiol-reactive fluorophores are available commercially (Molecular Probes, Inc., Eugene, Oreg., USA), including Alexa Fluor® 350, Alexa Fluor® 488, Alexa Fluor® 532, Alexa Fluor® 546, Alexa Fluor® 568, Alexa Fluor® 594, Alexa Fluor® 647 (monoclonal antibody labeling kits available from Molecular Probes, Inc., Eugene, Oreg., USA), BODIPY dyes, such as BODIPY 493/503, BODIPY FL, BODIPY R6G, BODIPY 530/550, BODIPY TMR, BODIPY 558/568, BODIPY 558/568, BODIPY 564/570, BODIPY 576/589, BODIPY 581/591, BODIPY TR, BODIPY 630/650, BODIPY 650/665, Cascade Blue, Cascade Yellow, Dansyl, lissamine rhodamine B, Marina Blue, Oregon Green 488, Oregon Green 514, Pacific Blue, rhodamine 6G, rhodamine green, rhodamine red, tetramethylrhodamine, Texas Red (available from Molecular Probes, Inc., Eugene, Oreg., USA).

[0348] The polypeptides of the present invention can also be conjugated to fluorophores, other proteins, and other macromolecules, using bifunctional linking reagents.

[0349] Common homobifunctional reagents include, e.g., APG, AEDP, BASED, BMB, BMDB, BMH, BMOE, BM[PEO]3, BM[PEO]4, BS3, BSOCOES, DFDNB, DMA, DMP, DMS, DPDPB, DSG, DSP (Lomant's Reagent), DSS, DST, DTBP, DTME, DTSSP, EGS, HBVS, Sulfo-BSOCOES, Sulfo-DST, Sulfo-EGS (all available from Pierce, Rockford, Ill., USA); common heterobifunctional cross-linkers include ABH, AMAS, ANB-NOS, APDP, ASBA, BMPA, BMPH, BMPS, EDC, EMCA, EMCH, EMCS, KMUA, KMUH, GMBS, LC-SMCC, LC-SPDP, MBS, M2C2H, MPBH, MSA, NHS-ASA, PDPH, PMPI, SADP, SAED, SAND, SANPAH, SASD, SATP, SBAP, SFAD, SIA, SIAB, SMCC, SMPB, SMPH, SMPT, SPDP, Sulfo-EMCS, Sulfo-GMBS, Sulfo-HSAB, Sulfo-KMUS, Sulfo-LC-SPDP, Sulfo-MBS, Sulfo-NHS-LC-ASA, Sulfo-SADP, Sulfo-SANPAH, Sulfo-SIAB, Sulfo-SMCC, Sulfo-SMPB, Sulfo-LC-SMPT, SVSB, TFCS (all available Pierce, Rockford, Ill., USA).

[0350] The proteins, protein fragments, and protein fusions of the present invention can be conjugated, using such cross-linking reagents, to fluorophores that are not amine- or thiol-reactive.

[0351] Other labels that usefully can be conjugated to the proteins, protein fragments, and fusion proteins of the present invention include radioactive labels, echosonographic contrast reagents, and MRI contrast agents.

[0352] The proteins, protein fragments, and protein fusions of the present invention can also usefully be conjugated using cross-linking agents to carrier proteins, such as KLH, bovine thyroglobulin, and even bovine serum albumin (BSA), to increase immunogenicity for raising anti-PCCP1 antibodies.

[0353] The proteins, protein fragments, and protein fusions of the present invention can also usefully be conjugated to polyethylene glycol (PEG); PEGylation increases the serum half life of proteins administered intravenously for replacement therapy. Delgado et al., Crit. Rev. Ther. Drug Carrier Syst. 9(3-4):249-304 (1992); Scott et al., Curr. Pharm. Des. 4(6):423-38 (1998); DeSantis et al., Curr. Opin. Biotechnol. 10(4):324-30 (1999), incorporated herein by reference in their entireties. PEG monomers can be attached to the protein directly or through a linker, with PEGylation using PEG monomers activated with tresyl chloride (2,2,2-trifluoroethanesulphonyl chloride) permitting direct attachment under mild conditions.

[0354] The isolated proteins of the present invention, including fusions thereof, can be produced by recombinant expression, typically using the expression vectors of the present invention as above-described or, if fewer than about 100 amino acids, by chemical synthesis (typically, solid phase synthesis), and, on occasion, by in vitro translation.

[0355] Production of the isolated proteins of the present invention can optionally be followed by purification.

[0356] Purification of recombinantly expressed proteins is now well within the skill in the art. See, e.g., Thorner et al. (eds.), Applications of Chimeric Genes and Hybrid Proteins, Part A: Gene Expression and Protein Purification (Methods in Enzymology, Volume 326), Academic Press (2000), (ISBN: 0121822273); Harbin (ed.), Cloning, Gene Expression and Protein Purification: Experimental Procedures and Process Rationale, Oxford Univ. Press (2001) (ISBN: 0195132947); Marshak et al., Strategies for Protein Purification and Characterization: A Laboratory Course Manual, Cold Spring Harbor Laboratory Press (1996) (ISBN: 0-87969-385-1); and Roe (ed.), Protein Purification Applications, Oxford University Press (2001), the disclosures of which are incorporated herein by reference in their entireties, and thus need not be detailed here.

[0357] Briefly, however, if purification tags have been fused through use of an expression vector that appends such tag, purification can be effected, at least in part, by means appropriate to the tag, such as use of immobilized metal affinity chromatography for polyhistidine tags. Other techniques common in the art include ammonium sulfate fractionation, immunoprecipitation, fast protein liquid chromatography (FPLC), high performance liquid chromatography (HPLC), and preparative gel electrophoresis.

[0358] Purification of chemically-synthesized peptides can readily be effected, e.g., by HPLC.

[0359] Accordingly, it is an aspect of the present invention to provide the isolated proteins of the present invention in pure or substantially pure form.

[0360] A purified protein of the present invention is an isolated protein, as above described, that is present at a concentration of at least 95%, as measured on a weight basis (w/w) with respect to total protein in a composition. Such purities can often be obtained during chemical synthesis without further purification, as, e.g., by HPLC. Purified proteins of the present invention can be present at a concentration (measured on a weight basis with respect to total protein in a composition) of 96%, 97%, 98%, and even 99%. The proteins of the present invention can even be present at levels of 99.5%, 99.6%, and even 99.7%, 99.8%, or even 99.9% following purification, as by HPLC.

[0361] Although high levels of purity are particularly useful when the isolated proteins of the present invention are used as therapeutic agents—such as vaccines, or for replacement therapy—the isolated proteins of the present invention are also useful at lower purity. For example, partially purified proteins of the present invention can be used as immunogens to raise antibodies in laboratory animals.

[0362] Thus, in another aspect, the present invention provides the isolated proteins of the present invention in substantially purified form. A “substantially purified protein” of the present invention is an isolated protein, as above described, present at a concentration of at least 70%, measured on a weight basis with respect to total protein in a composition. Usefully, the substantially purified protein is present at a concentration, measured on a weight basis with respect to total protein in a composition, of at least 75%, 80%, or even at least 85%, 90%, 91%, 92%, 93%, 94%, 94.5% or even at least 94.9%.

[0363] In preferred embodiments, the purified and substantially purified proteins of the present invention are in compositions that lack detectable ampholytes, acrylamide monomers, bis-acrylamide monomers, and polyacrylamide.

[0364] The proteins, fragments, and fusions of the present invention can usefully be attached to a substrate. The substrate can porous or solid, planar or non-planar; the bond can be covalent or noncovalent.

[0365] For example, the proteins, fragments, and fusions of the present invention can usefully be bound to a porous substrate, commonly a membrane, typically comprising nitrocellulose, polyvinylidene fluoride (PVDF), or cationically derivatized, hydrophilic PVDF; so bound, the proteins, fragments, and fusions of the present invention can be used to detect and quantify antibodies, e.g. in serum, that bind specifically to the immobilized protein of the present invention.

[0366] As another example, the proteins, fragments, and fusions of the present invention can usefully be bound to a substantially nonporous substrate, such as plastic, to detect and quantify antibodies, e.g. in serum, that bind specifically to the immobilized protein of the present invention. Such plastics include polymethylacrylic, polyethylene, polypropylene, polyacrylate, polymethylmethacrylate, polyvinylchloride, polytetrafluoroethylene, polystyrene, polycarbonate, polyacetal, polysulfone, celluloseacetate, cellulosenitrate, nitrocellulose, or mixtures thereof; when the assay is performed in standard microtiter dish, the plastic is typically polystyrene.

[0367] The proteins, fragments, and fusions of the present invention can also be attached to a substrate suitable for use as a surface enhanced laser desorption ionization source; so attached, the protein, fragment, or fusion of the present invention is useful for binding and then detecting secondary proteins that bind with sufficient affinity or avidity to the surface-bound protein to indicate biologic interaction therebetween. The proteins, fragments, and fusions of the present invention can also be attached to a substrate suitable for use in surface plasmon resonance detection; so attached, the protein, fragment, or fusion of the present invention is useful for binding and then detecting secondary proteins that bind with sufficient affinity or avidity to the surface-bound protein to indicate biological interaction therebetween.

[0368] PCCP1 Proteins

[0369] In a first series of protein embodiments, the invention provides an isolated PCCP1 polypeptide having an amino acid sequence encoded by the cDNA in SEQ ID NO: 3, which is full length PCCP1 protein. When used as immunogens, the full length proteins of the present invention can be used, inter alia, to elicit antibodies that bind to a variety of epitopes of the PCCP1 protein.

[0370] The invention further provides fragments of the above-described polypeptides, particularly fragments having at least 6 amino acids, typically at least 8 amino acids, often at least 15 amino acids, and even the entirety of the sequence given in SEQ ID NO: 3.

[0371] The invention further provides fragments of at least 6 amino acids, typically at least 8 amino acids, often at least 15 amino acids, and even the entirety of the sequence given in SEQ ID NO: 7.

[0372] The invention further provides fragments of at least 6 amino acids, typically at least 8 amino acids, often at least 15 amino acids, and even the entirety of the sequence given in SEQ ID NO: 11.

[0373] As described above, the invention further provides proteins that differ in sequence from those described with particularity in the above-referenced SEQ ID NOs., whether by way of insertion or deletion, by way of conservative or moderately conservative substitutions, as hybridization related proteins, or as cross-hybridizing proteins, with those that substantially retain a PCCP1 activity particularly useful.

[0374] The invention further provides fusions of the proteins and protein fragments herein described to heterologous polypeptides.

[0375] Antibodies and Antibody-Producing Cells

[0376] In another aspect, the invention provides antibodies, including fragments and derivatives thereof, that bind specifically to PCCP1 proteins and protein fragments of the present invention or to one or more of the proteins and protein fragments encoded by the isolated PCCP1 nucleic acids of the present invention. The antibodies of the present invention can be specific for all of linear epitopes, discontinuous epitopes, or conformational epitopes of such proteins or protein fragments, either as present on the protein in its native conformation or, in some cases, as present on the proteins as denatured, as, e.g., by solubilization in SDS.

[0377] In other embodiments, the invention provides antibodies, including fragments and derivatives thereof, the binding of which can be competitively inhibited by one or more of the PCCP1 proteins and protein fragments of the present invention, or by one or more of the proteins and protein fragments encoded by the isolated PCCP1 nucleic acids of the present invention.

[0378] As used herein, the term “antibody” refers to a polypeptide, at least a portion of which is encoded by at least one immunoglobulin gene, which can bind specifically to a first molecular species, and to fragments or derivatives thereof that remain capable of such specific binding.

[0379] By “bind specifically” and “specific binding” is here intended the ability of the antibody to bind to a first molecular species in preference to binding to other molecular species with which the antibody and first molecular species are admixed. An antibody is said specifically to “recognize” a first molecular species when it can bind specifically to that first molecular species.

[0380] As is well known in the art, the degree to which an antibody can discriminate as among molecular species in a mixture will depend, in part, upon the conformational relatedness of the species in the mixture; typically, the antibodies of the present invention will discriminate over adventitious binding to non-PCCP1 proteins by at least two-fold, more typically by at least 5-fold, typically by more than 10-fold, 25-fold, 50-fold, 75-fold, and often by more than 100-fold, and on occasion by more than 500-fold or 1000-fold. When used to detect the proteins or protein fragments of the present invention, the antibody of the present invention is sufficiently specific when it can be used to determine the presence of the protein of the present invention in samples derived from human prostate, testis, prostate tumor, colon tumor, brain, bone marrow, lung, placenta, and adrenal gland.

[0381] Typically, the affinity or avidity of an antibody (or antibody multimer, as in the case of an IgM pentamer) of the present invention for a protein or protein fragment of the present invention will be at least about 1×10⁻⁶ molar (M), typically at least about 5×10⁻⁷ M, usefully at least about 1×10⁻⁷ M, with affinities and avidities of at least 1×10⁻⁸ M, 5×10⁻⁹ M, and 1×10⁻¹⁰ M proving especially useful.

[0382] The antibodies of the present invention can be naturally-occurring forms, such as IgG, IgM, IgD, IgE, and IgA, from any mammalian species.

[0383] Human antibodies can, but will infrequently, be drawn directly from human donors or human cells. In such case, antibodies to the proteins of the present invention will typically have resulted from fortuitous immunization, such as autoimmune immunization, with the protein or protein fragments of the present invention. Such antibodies will typically, but will not invariably, be polyclonal.

[0384] Human antibodies are more frequently obtained using transgenic animals that express human immunoglobulin genes, which transgenic animals can be affirmatively immunized with the protein immunogen of the present invention. Human Ig-transgenic mice capable of producing human antibodies and methods of producing human antibodies therefrom upon specific immunization are described, inter alia, in U.S. Pat. Nos. 6,162,963; 6,150,584; 6,114,598; 6,075,181; 5,939,598; 5,877,397; 5,874,299; 5,814,318; 5,789,650; 5,770,429; 5,661,016; 5,633,425; 5,625,126; 5,569,825; 5,545,807; 5,545,806, and 5,591,669, the disclosures of which are incorporated herein by reference in their entireties. Such antibodies are typically monoclonal, and are typically produced using techniques developed for production of murine antibodies.

[0385] Human antibodies are particularly useful, and often preferred, when the antibodies of the present invention are to be administered to human beings as in vivo diagnostic or therapeutic agents, since recipient immune response to the administered antibody will often be substantially less than that occasioned by administration of an antibody derived from another species, such as mouse.

[0386] IgG, IgM, IgD, IgE and IgA antibodies of the present invention are also usefully obtained from other mammalian species, including rodents—typically mouse, but also rat, guinea pig, and hamster—lagomorphs, typically rabbits, and also larger mammals, such as sheep, goats, cows, and horses. In such cases, as with the transgenic human-antibody-producing non-human mammals, fortuitous immunization is not required, and the non-human mammal is typically affirmatively immunized, according to standard immunization protocols, with the protein or protein fragment of the present invention.

[0387] As discussed above, virtually all fragments of 8 or more contiguous amino acids of the proteins of the present invention can be used effectively as immunogens when conjugated to a carrier, typically a protein such as bovine thyroglobulin, keyhole limpet hemocyanin, or bovine serum albumin, conveniently-using a bifunctional linker such as those described elsewhere above, which discussion is incorporated by reference here.

[0388] Immunogenicity can also be conferred by fusion of the proteins and protein fragments of the present invention to other moieties.

[0389] For example, peptides of the present invention can be produced by solid phase synthesis on a branched polylysine core matrix; these multiple antigenic peptides (MAPs) provide high purity, increased avidity, accurate chemical definition and improved safety in vaccine development. Tam et al., Proc. Natl. Acad. Sci. USA 85:5409-5413 (1988); Posnett et al., J. Biol. Chem. 263, 1719-1725 (1988).

[0390] Protocols for immunizing non-human mammals are well-established in the art, Harlow et al. (eds.), Antibodies: A Laboratory Manual, Cold Spring Harbor Laboratory (1998) (ISBN: 0879693142); Coligan et al. (eds.), Current Protocols in Immunology, John Wiley & Sons, Inc. (2001) (ISBN: 0-471-52276-7); Zola, Monoclonal Antibodies: Preparation and Use of Monoclonal Antibodies and Engineered Antibody Derivatives (Basics: From Background to Bench), Springer Verlag (2000) (ISBN: 0387915907), the disclosures of which are incorporated herein by reference, and often include multiple immunizations, either with or without adjuvants such as Freund's complete adjuvant and Freund's incomplete adjuvant.

[0391] Antibodies from nonhuman mammals can be polyclonal or monoclonal, with polyclonal antibodies having certain advantages in immunohistochemical detection of the proteins of the present invention and monoclonal antibodies having advantages in identifying and distinguishing particular epitopes of the proteins of the present invention.

[0392] Following immunization, the antibodies of the present invention can be produced using any art-accepted technique. Such techniques are well known in the art, Coligan et al. (eds.), Current Protocols in Immunology, John Wiley & Sons, Inc. (2001) (ISBN: 0-471-52276-7); Zola, Monoclonal Antibodies: Preparation and Use of Monoclonal Antibodies and Engineered Antibody Derivatives (Basics: From Background to Bench), Springer Verlag (2000) (ISBN: 0387915907); Howard et al. (eds.), Basic Methods in Antibody Production and Characterization, CRC Press (2000) (ISBN: 0849394457); Harlow et al. (eds.), Antibodies: A Laboratory Manual, Cold Spring Harbor Laboratory (1998) (ISBN: 0879693142); Davis (ed.), Monoclonal Antibody Protocols, Vol. 45, Humana Press (1995) (ISBN: 0896033082); Delves (ed.), Antibody Production: Essential Techniques, John Wiley & Son Ltd (1997) (ISBN: 0471970107); Kenney, Antibody Solution: An Antibody Methods Manual, Chapman & Hall (1997) (ISBN: 0412141914), incorporated herein by reference in their entireties, and thus need not be detailed here.

[0393] Briefly, however, such techniques include, inter alia, production of monoclonal antibodies by hybridomas and expression of antibodies or fragments or derivatives thereof from host cells engineered to express immunoglobulin genes or fragments thereof. These two methods of production are not mutually exclusive: genes encoding antibodies specific for the proteins or protein fragments of the present invention can be cloned from hybridomas and thereafter expressed in other host cells. Nor need the two necessarily be performed together: e.g., genes encoding antibodies specific for the proteins and protein fragments of the present invention can be cloned directly from B cells known to be specific for the desired protein, as further described in U.S. Pat. No. 5,627,052, the disclosure of which is incorporated herein by reference in its entirety, or from antibody-displaying phage.

[0394] Recombinant expression in host cells is particularly useful when fragments or derivatives of the antibodies of the present invention are desired.

[0395] Host cells for recombinant antibody production—either whole antibodies, antibody fragments, or antibody derivatives—can be prokaryotic or eukaryotic.

[0396] Prokaryotic hosts are particularly useful for producing phage displayed antibodies of the present invention.

[0397] The technology of phage-displayed antibodies, in which antibody variable region fragments are fused, for example, to the gene III protein (pIII) or gene VIII protein (pVIII) for display on the surface of filamentous phage, such as M13, is by now well-established, Sidhu, Curr. Opin. Biotechnol. 11(6):610-6 (2000); Griffiths et al., Curr. Opin. Biotechnol. 9(1):102-8 (1998); Hoogenboom et al., Immunotechnology, 4(1):1-20 (1998); Rader et al., Current Opinion in Biotechnology 8:503-508 (1997); Aujame et al., Human Antibodies 8:155-168 (1997); Hoogenboom, Trends in Biotechnol. 15:62-70 (1997); de Kruif et al., 17:453-455 (1996); Barbas et al., Trends in Biotechnol. 14:230-234 (1996); Winter et al., Ann. Rev. Immunol. 433-455 (1994), and techniques and protocols required to generate, propagate, screen (pan), and use the antibody fragments from such libraries have recently been compiled, Barbas et al., Phage Display: A Laboratory Manual, Cold Spring Harbor Laboratory Press (2001) (ISBN 0-87969-546-3); Kay et al. (eds.), Phage Display of Peptides and Proteins: A Laboratory Manual, Academic Press, Inc. (1996); Abelson et al. (eds.), Combinatorial Chemistry, Methods in Enzymology vol. 267, Academic Press (May 1996), the disclosures of which are incorporated herein by reference in their entireties.

[0398] Typically, phage-displayed antibody fragments are scFv fragments or Fab fragments; when desired, full length antibodies can be produced by cloning the variable regions from the displaying phage into a complete antibody and expressing the full length antibody in a further prokaryotic or a eukaryotic host cell.

[0399] Eukaryotic cells are also useful for expression of the antibodies, antibody fragments, and antibody derivatives of the present invention.

[0400] For example, antibody fragments of the present invention can be produced in Pichia pastoris, Takahashi et al., Biosci. Biotechnol. Biochem. 64(10):2138-44 (2000); Freyre et al., J. Biotechnol. 76(2-3):157-63 (2000); Fischer et al., Biotechnol. Appl. Biochem. 30 (Pt 2):117-20 (1999); Pennell et al., Res. Immunol. 149(6):599-603 (1998); Eldin et al., J. Immunol. Methods. 201(1):67-75 (1997); and in Saccharomyces cerevisiae, Frenken et al., Res. Immunol. 149(6):589-99 (1998); Shusta et al., Nature Biotechnol. 16(8):773-7 (1998), the disclosures of which are incorporated herein by reference in their entireties.

[0401] Antibodies, including antibody fragments and derivatives, of the present invention can also be produced in insect cells, Li et al., Protein Expr. Purif. 21(1):121-8 (2001); Ailor et al., Biotechnol. Bioeng. 58(2-3):196-203 (1998); Hsu et al., Biotechnol. Prog. 13(1):96-104 (1997); Edelman et al., Immunology 91(1):13-9 (1997); and Nesbit et al., J. Immunol. Methods. 151(1-2):201-8 (1992), the disclosures of which are incorporated herein by reference in their entireties.

[0402] Antibodies and fragments and derivatives thereof of the present invention can also be produced in plant cells, Giddings et al., Nature Biotechnol. 18(11):1151-5 (2000); Gavilondo et al., Biotechniques 29(1):128-38 (2000); Fischer et al., J. Biol. Regul. Homeost. Agents 14(2):83-92 (2000); Fischer et al., Biotechnol. Appl. Biochem. 30 (Pt 2):113-6 (1999); Fischer et al., Biol. Chem. 380(7-8):825-39 (1999); Russell, Curr. Top. Microbiol. Immunol. 240:119-38 (1999); and Ma et al., Plant Physiol. 109(2):341-6 (1995), the disclosures of which are incorporated herein by reference in their entireties.

[0403] Mammalian cells useful for recombinant expression of antibodies, antibody fragments, and antibody derivatives of the present invention include CHO cells, COS cells, 293 cells, and myeloma cells.

[0404] Verma et al., J. Immunol. Methods 216(1-2):165-81 (1998), review and compare bacterial, yeast, insect and mammalian expression systems for expression of antibodies.

[0405] Antibodies of the present invention can also be prepared by cell free translation, as further described in Merk et al., J. Biochem. (Tokyo). 125(2):328-33 (1999) and Ryabova et al., Nature Biotechnol. 15(1):79-84 (1997), and in the milk of transgenic animals, as further described in Pollock et al., J. Immunol. Methods 231(1-2):147-57 (1999), the disclosures of which are incorporated herein by reference in their entireties.

[0406] The invention further provides antibody fragments that bind specifically to one or more of the proteins and protein fragments of the present invention, to one or more of the proteins and protein fragments encoded by the isolated nucleic acids of the present invention, or the binding of which can be competitively inhibited by one or more of the proteins and protein fragments of the present invention or one or more of the proteins and protein fragments encoded by the isolated nucleic acids of the present invention.

[0407] Among such useful fragments are Fab, Fab′, Fv, F(ab)′₂, and single chain Fv (scFv) fragments. Other useful fragments are described in Hudson, Curr. Opin. Biotechnol. 9(4):395-402 (1998).

[0408] It is also an aspect of the present invention to provide antibody derivatives that bind specifically to one or more of the proteins and protein fragments of the present invention, to one or more of the proteins and protein fragments encoded by the isolated nucleic acids of the present invention, or the binding of which can be competitively inhibited by one or more of the proteins and protein fragments of the present invention or one or more of the proteins and protein fragments encoded by the isolated nucleic acids of the present invention.

[0409] Among such useful derivatives are chimeric, primatized, and humanized antibodies; such derivatives are less immunogenic in human beings, and thus more suitable for in vivo administration, than are unmodified antibodies from non-human mammalian species.

[0410] Chimeric antibodies typically include heavy and/or light chain variable regions (including both CDR and framework residues) of immunoglobulins of one species, typically mouse, fused to constant regions of another species, typically human. See, e.g., U.S. Pat. No. 5,807,715; Morrison et al., Proc. Natl. Acad. Sci USA. 81(21):6851-5 (1984); Sharon et al., Nature 309(5966):364-7 (1984); Takeda et al., Nature 314 (6010):452-4 (1985), the disclosures of which are incorporated herein by reference in their entireties. Primatized and humanized antibodies typically include heavy and/or light chain CDRs from a murine antibody grafted into a non-human primate or human antibody V region framework, usually further comprising a human constant region, Riechmann et al., Nature 332(6162):323-7 (1988); Co et al., Nature 351(6326):501-2 (1991); U.S. Pat. Nos. 6,054,297; 5,821,337; 5,770,196; 5,766,886; 5,821,123; 5,869,619; 6,180,377; 6,013,256; 5,693,761; and 6,180,370, the disclosures of which are incorporated herein by reference in their entireties.

[0411] Other useful antibody derivatives of the invention include heteromeric antibody complexes and antibody fusions, such as diabodies (bispecific antibodies), single-chain diabodies, and intrabodies.

[0412] The antibodies of the present invention, including fragments and derivatives thereof, can usefully be labeled. It is, therefore, another aspect of the present invention to provide labeled antibodies that bind specifically to one or more of the proteins and protein fragments of the present invention, to one or more of the proteins and protein fragments encoded by the isolated nucleic acids of the present invention, or the binding of which can be competitively inhibited by one or more of the proteins and protein fragments of the present invention or one or more of the proteins and protein fragments encoded by the isolated nucleic acids of the present invention.

[0413] The choice of label depends, in part, upon the desired use.

[0414] For example, when the antibodies of the present invention are used for immunohistochemical staining of tissue samples, the label can usefully be an enzyme that catalyzes production and local deposition of a detectable product.

[0415] Enzymes typically conjugated to antibodies to permit their immunohistochemical visualization are well known, and include alkaline phosphatase, β-galactosidase, glucose oxidase, horseradish peroxidase (HRP), and urease. Typical substrates for production and deposition of visually detectable products include o-nitrophenyl-beta-D-galactopyranoside (ONPG); o-phenylenediamine dihydrochloride (OPD); p-nitrophenyl phosphate (PNPP); p-nitrophenyl-beta-D-galactopryanoside (PNPG); 3′,3′-diaminobenzidine (DAB); 3-amino-9-ethylcarbazole (AEC); 4-chloro-1-naphthol (CN); 5-bromo-4-chloro-3-indolyl-phosphate (BCIP); ABTS®; BluoGal; iodonitrotetrazolium (INT); nitroblue tetrazolium chloride (NBT); phenazine methosulfate (PMS); phenolphthalein monophosphate (PMP); tetramethyl benzidine (TMB); tetranitroblue tetrazolium (TNBT); X-Gal; X-Gluc; and X-Glucoside.

[0416] Other substrates can be used to produce products for local deposition that are luminescent. For example, in the presence of hydrogen peroxide (H₂O₂), horseradish peroxidase (HRP) can catalyze the oxidation of cyclic diacylhydrazides, such as luminol. Immediately following the oxidation, the luminol is in an excited state (intermediate reaction product), which decays to the ground state by emitting light. Strong enhancement of the light emission is produced by enhancers, such as phenolic compounds. Advantages include high sensitivity, high resolution, and rapid detection without radioactivity and requiring only small amounts of antibody. See, e.g., Thorpe et al., Methods Enzymol. 133:331-53 (1986); Kricka et al., J. Immunoassay 17(1):67-83 (1996); and Lundqvist et al., J. Biolumin. Chemilumin. 10(6):353-9 (1995), the disclosures of which are incorporated herein by reference in their entireties. Kits for such enhanced chemiluminescent detection (ECL) are available commercially.

[0417] The antibodies can also be labeled using colloidal gold.

[0418] As another example, when the antibodies of the present invention are used, e.g., for flow cytometric detection, for scanning laser cytometric detection, or for fluorescent immunoassay, they can usefully be labeled with fluorophores.

[0419] There are a wide variety of fluorophore labels that can usefully be attached to the antibodies of the present invention.

[0420] For flow cytometric applications, both for extracellular detection and for intracellular detection, common useful fluorophores can be fluorescein isothiocyanate (FITC), allophycocyanin (APC), R-phycoerythrin (PE), peridinin chlorophyll protein (PerCP), Texas Red, Cy3, Cy5, fluorescence resonance energy tandem fluorophores such as PerCP-Cy5.5, PE-Cy5, PE-Cy5.5, PE-Cy7, PE-Texas Red, and APC-Cy7.

[0421] Other fluorophores include, inter alia, Alexa Fluor® 350, Alexa Fluor® 488, Alexa Fluor® 532, Alexa Fluor® 546, Alexa Fluor® 568, Alexa Fluor® 594, Alexa Fluor® 647 (monoclonal antibody labeling kits available from Molecular Probes, Inc., Eugene, Oreg., USA), BODIPY dyes, such as BODIPY 493/503, BODIPY FL, BODIPY R6G, BODIPY 530/550, BODIPY TMR, BODIPY 558/568, BODIPY 558/568, BODIPY 564/570, BODIPY 576/589, BODIPY 581/591, BODIPY TR, BODIPY 630/650, BODIPY 650/665, Cascade Blue, Cascade Yellow, Dansyl, lissamine rhodamine B, Marina Blue, Oregon Green 488, Oregon Green 514, Pacific Blue, rhodamine 6G, rhodamine green, rhodamine red, tetramethylrhodamine, Texas Red (available from Molecular Probes, Inc., Eugene, Oreg., USA), and Cy2, Cy3, Cy3.5, Cy5, Cy5.5, Cy7, all of which are also useful for fluorescently labeling the antibodies of the present invention.

[0422] For secondary detection using labeled avidin, streptavidin, captavidin or neutravidin, the antibodies of the present invention can usefully be labeled with biotin.

[0423] When the antibodies of the present invention are used, e.g., for western blotting applications, they can usefully be labeled with radioisotopes, such as ³³P, ³²P, ³⁵S, ³H, and ¹²⁵I.

[0424] As another example, when the antibodies of the present invention are used for radioimmunotherapy, the label can usefully be ²²⁸Th, ²²⁷Ac, ²²⁵Ac, ²²³Ra, ²¹³Bi, ²¹²Pb, ²¹²Bi, ²¹¹At, ²⁰³Pb, ¹⁹⁴Os, ¹⁸⁸Re, ¹⁸⁶Re, ¹⁵³Sm, ¹⁴⁹Tb, ¹³¹I, ¹²⁵I, ¹¹¹In, ¹⁰⁵Rh, ^{99m}Tc, ⁹⁷Ru, ⁹⁰Y, ⁹⁰Sr, ⁸⁸Y, ⁷²Se, ⁶⁷Cu, or ⁴⁷Sc.

[0425] As another example, when the antibodies of the present invention are to be used for in vivo diagnostic use, they can be rendered detectable by conjugation to MRI contrast agents, such as gadolinium diethylenetriaminepentaacetic acid (DTPA), Lauffer et al., Radiology 207(2):529-38 (1998), or by radioisotopic labeling

[0426] As would be understood, use of the labels described above is not restricted to the application as for which they were mentioned.

[0427] The antibodies of the present invention, including fragments and derivatives thereof, can also be conjugated to toxins, in order to target the toxin's ablative action to cells that display and/or express the proteins of the present invention. Commonly, the antibody in such immunotoxins is conjugated to Pseudomonas exotoxin A, diphtheria toxin, shiga toxin A, anthrax toxin lethal factor, or ricin. See Hall (ed.), Immunotoxin Methods and Protocols (Methods in Molecular Biology, Vol 166), Humana Press (2000) (ISBN:0896037754); and Frankel et al. (eds.), Clinical Applications of Immunotoxins, Springer-Verlag New York, Incorporated (1998) (ISBN:3540640975), the disclosures of which are incorporated herein by reference in their entireties, for review.

[0428] The antibodies of the present invention can usefully be attached to a substrate, and it is, therefore, another aspect of the invention to provide antibodies that bind specifically to one or more of the proteins and protein fragments of the present invention, to one or more of the proteins and protein fragments encoded by the isolated nucleic acids of the present invention, or the binding of which can be competitively inhibited by one or more of the proteins and protein fragments of the present invention or one or more of the proteins and protein fragments encoded by the isolated nucleic acids of the present invention, attached to a substrate.

[0429] Substrates can be porous or nonporous, planar or nonplanar.

[0430] For example, the antibodies of the present invention can usefully be conjugated to filtration media, such as NHS-activated Sepharose or CNBr-activated Sepharose for purposes of immunoaffinity chromatography.

[0431] For example, the antibodies of the present invention can usefully be attached to paramagnetic microspheres, typically by biotin-streptavidin interaction, which microsphere can then be used for isolation of cells that express or display the proteins of the present invention. As another example, the antibodies of the present invention can usefully be attached to the surface of a microtiter plate for ELISA.

[0432] As noted above, the antibodies of the present invention can be produced in prokaryotic and eukaryotic cells. It is, therefore, another aspect of the present invention to provide cells that express the antibodies of the present invention, including hybridoma cells, B cells, plasma cells, and host cells recombinantly modified to express the antibodies of the present invention.

[0433] In yet a further aspect, the present invention provides aptamers evolved to bind specifically to one or more of the proteins and protein fragments of the present invention, to one or more of the proteins and protein fragments encoded by the isolated nucleic acids of the present invention, or the binding of which can be competitively inhibited by one or more of the proteins and protein fragments of the present invention or one or more of the proteins and protein fragments encoded by the isolated nucleic acids of the present invention.

[0434] PCCP1 Antibodies

[0435] In a first series of antibody embodiments, the invention provides antibodies, both polyclonal and monoclonal, and fragments and derivatives thereof, that bind specifically to a polypeptide having an amino acid sequence encoded by the cDNA in SEQ ID NO: 1, which are full length PCCP1 proteins.

[0436] In a second series of antibody embodiments, the invention provides antibodies, both polyclonal and monoclonal, and fragments and derivatives thereof, that bind specifically to a polypeptide having an amino acid sequence in SEQ ID NO: 7, which is a novel portion of the PCCP1 protein.

[0437] In a third series of antibody embodiments, the invention provides antibodies, both polyclonal and monoclonal, and fragments and derivatives thereof, that bind specifically to a polypeptide having an amino acid sequence in SEQ ID NO: 11, which is a novel portion of the PCCP1 protein.

[0438] Such antibodies are useful in in vitro immunoassays, such as ELISA, western blot or immunohistochemical assay of normal and tumor tissuses. Such antibodies are also useful in isolating and purifying PCCP1 proteins, including related cross-reactive proteins, by immunoprecipitation, immunoaffinity chromatography, or magnetic bead-mediated purification.

[0439] In another series of antibody embodiments, the invention provides antibodies, both polyclonal and monoclonal, and fragments and derivatives thereof, the specific binding of which can be competitively inhibited by the isolated proteins and polypeptides of the present invention.

[0440] In other embodiments, the invention further provides the above-described antibodies detectably labeled, and in yet other embodiments, provides the above-described antibodies attached to a substrate.

[0441] Pharmaceutical Compositions

[0442] PCCP1 is important for tumor suppression; defects in PCCP1 expression, activity, distribution, localization, and/or solubility are a cause of human disease, which disease can manifest as a disorder of prostate, testis, colon, brain, bone marrow, lung, placenta or adrenal gland function. Accordingly, pharmaceutical compositions comprising nucleic acids, proteins, and antibodies of the present invention, as well as mimetics, agonists, antagonists, or inhibitors of PCCP1 activity, can be administered as therapeutics for treatment of PCCP1 defects.

[0443] Thus, in another aspect, the invention provides pharmaceutical compositions comprising the nucleic acids, nucleic acid fragments, proteins, protein fusions, protein fragments, antibodies, antibody derivatives, antibody fragments, mimetics, agonists, antagonists, and inhibitors of the present invention.

[0444] Such a composition typically contains from about 0.1 to 90% by weight of a therapeutic agent of the invention formulated in and/or with a pharmaceutically acceptable carrier or excipient.

[0445] Pharmaceutical formulation is a well-established art, and is further described in Gennaro (ed.), Remington: The Science and Practice of Pharmacy, 20^{th} ed., Lippincott, Williams & Wilkins (2000) (ISBN: 0683306472); Ansel et al., Pharmaceutical Dosage Forms and Drug Delivery Systems, 7^{th} ed., Lippincott Williams & Wilkins Publishers (1999) (ISBN: 0683305727); and Kibbe (ed.), Handbook of Pharmaceutical Excipients American Pharmaceutical Association, 3^{rd} ed. (2000) (ISBN: 091733096X), the disclosures of which are incorporated herein by reference in their entireties, and thus need not be described in detail herein.

[0446] Briefly, however, formulation of the pharmaceutical compositions of the present invention will depend upon the route chosen for administration. The pharmaceutical compositions utilized in this invention can be administered by various routes including both enteral and parenteral routes, including oral, intravenous, intramuscular, subcutaneous, inhalation, topical, sublingual, rectal, intra-arterial, intramedullary, intrathecal, intraventricular, transmucosal, transdermal, intranasal, intraperitoneal, intrapulmonary, and intrauterine.

[0447] Oral dosage forms can be formulated as tablets, pills, dragees, capsules, liquids, gels, syrups, slurries, suspensions, and the like, for ingestion by the patient.

[0448] Solid formulations of the compositions for oral administration can contain suitable carriers or excipients, such as carbohydrate or protein fillers, such as sugars, including lactose, sucrose, mannitol, or sorbitol; starch from corn, wheat, rice, potato, or other plants; cellulose, such as methyl cellulose, hydroxypropylmethyl-cellulose, sodium carboxymethylcellulose, or microcrystalline cellulose; gums including arabic and tragacanth; proteins such as gelatin and collagen; inorganics, such as kaolin, calcium carbonate, dicalcium phosphate, sodium chloride; and other agents such as acacia and alginic acid.

[0449] Agents that facilitate disintegration and/or solubilization can be added, such as the cross-linked polyvinyl pyrrolidone, agar, alginic acid, or a salt thereof, such as sodium alginate, microcrystalline cellulose, corn starch, sodium starch glycolate, and alginic acid.

[0450] Tablet binders that can be used include acacia, methylcellulose, sodium carboxymethylcellulose, polyvinylpyrrolidone (Povidone™), hydroxypropyl methylcellulose, sucrose, starch and ethylcellulose.

[0451] Lubricants that can be used include magnesium stearates, stearic acid, silicone fluid, talc, waxes, oils, and colloidal silica.

[0452] Fillers, agents that facilitate disintegration and/or solubilization, tablet binders and lubricants, including the aforementioned, can be used singly or in combination.

[0453] Solid oral dosage forms need not be uniform throughout.

[0454] For example, dragee cores can be used in conjunction with suitable coatings, such as concentrated sugar solutions, which can also contain gum arabic, talc, polyvinylpyrrolidone, carbopol gel, polyethylene glycol, and/or titanium dioxide, lacquer solutions, and suitable organic solvents or solvent mixtures.

[0455] Oral dosage forms of the present invention include push-fit capsules made of gelatin, as well as soft, sealed capsules made of gelatin and a coating, such as glycerol or sorbitol. Push-fit capsules can contain active ingredients mixed with a filler or binders, such as lactose or starches, lubricants, such as talc or magnesium stearate, and, optionally, stabilizers. In soft capsules, the active compounds can be dissolved or suspended in suitable liquids, such as fatty oils, liquid, or liquid polyethylene glycol with or without stabilizers.

[0456] Additionally, dyestuffs or pigments can be added to the tablets or dragee coatings for product identification or to characterize the quantity of active compound, i.e., dosage.

[0457] Liquid formulations of the pharmaceutical compositions for oral (enteral) administration are prepared in water or other aqueous vehicles and can contain various suspending agents such as methylcellulose, alginates, tragacanth, pectin, kelgin, carrageenan, acacia, polyvinylpyrrolidone, and polyvinyl alcohol. The liquid formulations can also include solutions, emulsions, syrups and elixirs containing, together with the active compound(s), wetting agents, sweeteners, and coloring and flavoring agents.

[0458] The pharmaceutical compositions of the present invention can also be formulated for parenteral administration.

[0459] For intravenous injection, water soluble versions of the compounds of the present invention are formulated in, or if provided as a lyophilate, mixed with, a physiologically acceptable fluid vehicle, such as 5% dextrose (“D5”), physiologically buffered saline, 0.9% saline, Hanks' solution, or Ringer's solution.

[0460] Intramuscular preparations, e.g. a sterile formulation of a suitable soluble salt form of the compounds of the present invention, can be dissolved and administered in a pharmaceutical excipient such as Water-for-Injection, 0.9% saline, or 5% glucose solution. Alternatively, a suitable insoluble form of the compound can be prepared and administered as a suspension in an aqueous base or a pharmaceutically acceptable oil base, such as an ester of a long chain fatty acid (e.g., ethyl oleate), fatty oils such as sesame oil, triglycerides, or liposomes.

[0461] Parenteral formulations of the compositions can contain various carriers such as vegetable oils, dimethylacetamide, dimethylformamide, ethyl lactate, ethyl carbonate, isopropyl myristate, ethanol, polyols (glycerol, propylene glycol, liquid polyethylene glycol, and the like).

[0462] Aqueous injection suspensions can also contain substances that increase the viscosity of the suspension, such as sodium carboxymethyl cellulose, sorbitol, or dextran. Non-lipid polycationic amino polymers can also be used for delivery. Optionally, the suspension can also contain suitable stabilizers or agents that increase the solubility of the compounds to allow for the preparation of highly concentrated solutions.

[0463] Pharmaceutical compositions of the present invention can also be formulated to permit injectable, long-term, deposition.

[0464] The pharmaceutical compositions of the present invention can be administered topically.

[0465] A topical semi-solid ointment formulation typically contains a concentration of the active ingredient from about 1 to 20%, e.g., 5 to 10%, in a carrier such as a pharmaceutical cream base. Various formulations for topical use include drops, tinctures, lotions, creams, solutions, and ointments containing the active ingredient and various supports and vehicles. In other transdermal formulations, typically in patch-delivered formulations, the pharmaceutically active compound is formulated with one or more skin penetrants, such as 2-N-methyl-pyrrolidone (NMP) or Azone.

[0466] Inhalation formulations can also readily be formulated. For inhalation, various powder and liquid formulations can be prepared.

[0467] The pharmaceutically active compound in the pharmaceutical compositions of the present inention can be provided as the salt of a variety of acids, including but not limited to hydrochloric, sulfuric, acetic, lactic, tartaric, malic, and succinic acid. Salts tend to be more soluble in aqueous or other protonic solvents than are the corresponding free base forms.

[0468] After pharmaceutical compositions have been prepared, they are packaged in an appropriate container and labeled for treatment of an indicated condition.

[0469] The active compound will be present in an amount effective to achieve the intended purpose. The determination of an effective dose is well within the capability of those skilled in the art.

[0470] A “therapeutically effective dose” refers to that amount of active ingredient—for example PCCP1 protein, fusion protein, or fragments thereof, antibodies specific for PCCP1, agonists, antagonists or inhibitors of PCCP1—which ameliorates the signs or symptoms of the disease or prevents progression thereof; as would be understood in the medical arts, cure, although desired, is not required.

[0471] The therapeutically effective dose of the pharmaceutical agents of the present invention can be estimated initially by in vitro tests, such as cell culture assays, followed by assay in model animals, usually mice, rats, rabbits, dogs, or pigs. The animal model can also be used to determine an initial useful concentration range and route of administration.

[0472] For example, the ED50 (the dose therapeutically effective in 50% of the population) and LD50 (the dose lethal to 50% of the population) can be determined in one or more cell culture of animal model systems. The dose ratio of toxic to therapeutic effects is the therapeutic index, which can be expressed as LD50/ED50. Pharmaceutical compositions that exhibit large therapeutic indices are particularly useful.

[0473] The data obtained from cell culture assays and animal studies is used in formulating an initial dosage range for human use, and preferably provides a range of circulating concentrations that includes the ED50 with little or no toxicity. After administration, or between successive administrations, the circulating concentration of active agent varies within this range depending upon pharmacokinetic factors well known in the art, such as the dosage form employed, sensitivity of the patient, and the route of administration.

[0474] The exact dosage will be determined by the practitioner, in light of factors specific to the subject requiring treatment. Factors that can be taken into account by the practitioner include the severity of the disease state, general health of the subject, age, weight, gender of the subject, diet, time and frequency of administration, drug combination(s), reaction sensitivities, and tolerance/response to therapy. Long-acting pharmaceutical compositions can be administered every 3 to 4 days, every week, or once every two weeks depending on half-life and clearance rate of the particular formulation.

[0475] Normal dosage amounts may vary from 0.1 to 100,000 micrograms, up to a total dose of about 1 g, depending upon the route of administration. Where the therapeutic agent is a protein or antibody of the present invention, the therapeutic protein or antibody agent typically is administered at a daily dosage of 0.01 mg to 30 mg/kg of body weight of the patient (e.g., 1 mg/kg to 5 mg/kg). The pharmaceutical formulation can be administered in multiple doses per day, if desired, to achieve the total desired daily dose.

[0476] Guidance as to particular dosages and methods of delivery is provided in the literature and generally available to practitioners in the art. Those skilled in the art will employ different formulations for nucleotides than for proteins or their inhibitors. Similarly, delivery of polynucleotides or polypeptides will be specific to particular cells, conditions, locations, etc.

[0477] Conventional methods, known to those of ordinary skill in the art of medicine, can be used to administer the pharmaceutical formulation(s) of the present invention to the patient. The pharmaceutical compositions of the present invention can be administered alone, or in combination with other therapeutic agents or interventions.

[0478] Therapeutic Methods

[0479] The present invention further provides methods of treating subjects having defects in PCCP1—e.g., in expression, activity, distribution, localization, and/or solubility of PCCP1—which can manifest as a disorder of prostate, testis, colon, brain, bone marrow, lung, placenta or adrenal gland function. As used herein, “treating” includes all medically-acceptable types of therapeutic intervention, including palliation and prophylaxis (prevention) of disease.

[0480] In one embodiment of the therapeutic methods of the present invention, a therapeutically effective amount of a pharmaceutical composition comprising PCCP1 protein, fusion, fragment or derivative thereof is administered to a subject with a clinically-significant PCCP1 defect.

[0481] Protein compositions are administered, for example, to complement a deficiency in native PCCP1. In other embodiments, protein compositions are administered as a vaccine to elicit a humoral and/or cellular immune response to PCCP1. The immune response can be used to modulate activity of PCCP1 or, depending on the immunogen, to immunize against aberrant or aberrantly expressed forms, such as mutant or inappropriately expressed isoforms. In yet other embodiments, protein fusions having a toxic moiety are administered to ablate cells that aberrantly accumulate PCCP1.

[0482] In another embodiment of the therapeutic methods of the present invention, a therapeutically effective amount of a pharmaceutical composition comprising nucleic acid of the present invention is administered. The nucleic acid can be delivered in a vector that drives expression of PCCP1 protein, fusion, or fragment thereof, or without such vector.

[0483] Nucleic acid compositions that can drive expression of PCCP1 are administered, for example, to complement a deficiency in native PCCP1, or as DNA vaccines. Expression vectors derived from virus, replication deficient retroviruses, adenovirus, adeno-associated (AAV) virus, herpes virus, or vaccinia virus can be used—see, e.g., Cid-Arregui (ed.), Viral Vectors: Basic Science and Gene Therapy, Eaton Publishing Co., 2000 (ISBN: 188129935X)—as can plasmids.

[0484] Antisense nucleic acid compositions, or vectors that drive expression of PCCP1 antisense nucleic acids, are administered to downregulate transcription and/or translation of PCCP1 in circumstances in which excessive production, or production of aberrant protein, is the pathophysiologic basis of disease.

[0485] Antisense compositions useful in therapy can have sequence that is complementary to coding or to noncoding regions of the PCCP1 gene. For example, oligonucleotides derived from the transcription initiation site, e.g., between positions −10 and +10 from the start site, are particularly useful.

[0486] Catalytic antisense compositions, such as ribozymes, that are capable of sequence-specific hybridization to PCCP1 transcripts, are also useful in therapy. See, e.g., Phylactou, Adv. Drug Deliv. Rev. 44(2-3):97-108 (2000); Phylactou et al., Hum. Mol. Genet. 7(10):1649-53 (1998); Rossi, Ciba Found. Symp. 209:195-204 (1997); and Sigurdsson et al., Trends Biotechnol. 13(8):286-9 (1995), the disclosures of which are incorporated herein by reference in their entireties.

[0487] Other nucleic acids useful in the therapeutic methods of the present invention are those that are capable of triplex helix formation in or near the PCCP1 genomic locus. Such triplexing oligonucleotides are able to inhibit transcription, Intody et al., Nucleic Acids Res. 28(21):4283-90 (2000); McGuffie et al., Cancer Res. 60(14):3790-9 (2000), the disclosures of which are incorporated herein by reference, and pharmaceutical compositions comprising such triplex forming oligos (TFOs) are administered in circumstances in which excessive production, or production of aberrant protein, is a pathophysiologic basis of disease.

[0488] In another embodiment of the therapeutic methods of the present invention, a therapeutically effective amount of a pharmaceutical composition comprising an antibody (including fragment or derivative thereof) of the present invention is administered. As is well known, antibody compositions are administered, for example, to antagonize activity of PCCP1, or to target therapeutic agents to sites of PCCP1 presence and/or accumulation.

[0489] In another embodiment of the therapeutic methods of the present invention, a pharmaceutical composition comprising a non-antibody antagonist of PCCP1 is administered. Antagonists of PCCP1 can be produced using methods generally known in the art. In particular, purified PCCP1 can be used to screen libraries of pharmaceutical agents, often combinatorial libraries of small molecules, to identify those that specifically bind and antagonize at least one activity of PCCP1.

[0490] In other embodiments a pharmaceutical composition comprising an agonist of PCCP1 is administered. Agonists can be identified using methods analogous to those used to identify antagonists.

[0491] In still other therapeutic methods of the present invention, pharmaceutical compositions comprising host cells that express PCCP1, fusions, or fragments thereof can be administered. In such cases, the cells are typically autologous, so as to circumvent xenogeneic or allotypic rejection, and are administered to complement defects in PCCP1 production or activity.

[0492] In other embodiments, pharmaceutical compositions comprising the PCCP1 proteins, nucleic acids, antibodies, antagonists, and agonists of the present invention can be administered in combination with other appropriate therapeutic agents. Selection of the appropriate agents for use in combination therapy can be made by one of ordinary skill in the art according to conventional pharmaceutical principles. The combination of therapeutic agents or approaches can act additively or synergistically to effect the treatment or prevention of the various disorders described above, providing greater therapeutic efficacy and/or permitting use of the pharmaceutical compositions of the present invention using lower dosages, reducing the potential for adverse side effects.

[0493] Transgenic Animals and Cells

[0494] In another aspect, the invention provides transgenic cells and non-human organisms comprising PCCP1 isoform nucleic acids, and transgenic cells and non-human organisms with targeted disruption of the endogenous orthologue of the human PCCP1 gene.

[0495] The cells can be embryonic stem cells or somatic cells. The transgenic non-human organisms can be chimeric, nonchimeric heterozygotes, and nonchimeric homozygotes.

[0496] Diagnostic Methods

[0497] The nucleic acids of the present invention can be used as nucleic acid probes to assess the levels of PCCP1 mRNA in normal and tumor tissuses, and antibodies of the present invention can be used to assess the expression levels of PCCP1 proteins in normal and tumor tissuses of for the diagnosis and prognosis of cancer.

[0498] The following examples are offered for purpose of illustration, not limitation.

### EXAMPLE 1

### Identification and Characterization of cDNAs Encoding PCCP1 Proteins

[0499] Bioinformatic algorithms were applied to human genomic sequence from the prostate specific, chromosome 16q23 region to identify putative exons. Based on sequence information of one such exon, we identified a possible open reading frame. The predicted protein sequence from this potential exon shares significant homology with testis-specific chromodomain Y-like protein. The gene was named prostate cancer candidate protein 1, or PCCP1.

[0500] Marathon-Ready™ adult prostate cDNA (Clontech Laboratories, Palo Alto, Calif., USA) was used as a substrate for standard RT-PCRs to obtain cDNA clones that correspond to PCCP1 along with the forward primer (5′-TGGAAAGGCTACGGGAGCAC-3′; SEQ ID NO: 3309) and the reverse primer (5′-GGAGTCAAGGCCTTTGGAGGA-3′; SEQ ID NO: 3310). In addition, Marathon-Ready™ adult prostate cDNA (Clontech Laboratories) was used as a substrate for standard RACE (rapid amplification of cDNA ends) to obtain cDNA clones that correspond to the 5′ and 3′ ends of the gene. Three overlapping cDNA products were cloned that together contained the complete sequence of PCCP1. The PCCP1 cDNAs were sequenced on both strands using a MegaBace™ 1000 sequencer (Amersham Biosciences, Sunnyvale, Calif., USA). Sequencing both strands provided us with the exact chemical structure of the cDNAs, which are shown in FIG. 3 and further presented in the SEQUENCE LISTING as SEQ ID NO: 1, and placed us in actual physical possession of the entire set of single-base incremented fragments of the sequenced clone, starting at the 5′ and 3′ termini.

[0501] As shown in FIG. 3, the PCCP1 cDNA spans 2088 nucleotides and contains an open reading frame from nucleotide 93 through and including nt 1616 (inclusive of termination codon), predicting a protein of 507 amino acids with a (posttranslationally unmodified) molecular weight of 56.6 kD. The clone appears full length, with the reading frame opening starting with a methionine and terminating with a stop codon.

[0502] BLAST query of genomic sequence identified two BACS, spanning greater than 118.9 kb, that constitute the minimum set of clones encompassing the cDNA sequence. Based upon the known origin of the BACs (GenBank accession numbers AC009070.9 and AC092332.2), the PCCP1 gene can be mapped to human chromosome 16q23.2.

[0503] Comparison of the cDNA and genomic sequences identified 7 exons. Exon organization is listed in Table 2.

TABLE 1
PCCP1 Exon Structure

| Exon no. | cDNA range | genomic range | BAC accession |
|---|---|---|---|
| 1 | 1-116 | 55672-55559 | AC009070.9 |
| 2 | 117-710 | 119164-118571 | AC092332.2 |
| 3 | 711-929 | 67272-67054 | |
| 4 | 930-1102 | 54970-54798 | |
| 5 | 1103-1313 | 46871-46661 | |
| 6 | 1314-1457 | 42270-42127 | |
| 7 | 1458-2088 | 38581-37951 | |

[0504] FIG. 2 schematizes the exon organization of the PCCP1 clone.

[0505] At the top is shown the bacterial artificial chromosomes (BAC), with GenBank accession numbers, that span the human PCCP1 locus.

[0506] As shown in FIG. 2, PCCP1, encoding a protein of 507 amino acids, and comprising exons 1-7. The predicted molecular weight, prior to any post-translational modification, is 56.6 kD.

[0507] The sequence of the PCCP1 cDNA was used as a BLAST query into the GenBank nr and dbEst databases. The nr database includes all non-redundant GenBank coding sequence translations, sequences derived from the 3-dimensional structures in the Brookhaven Protein Data Bank (PDB), sequences from SwissProt, sequences from the protein information resource (PIR), and sequences from protein research foundation (PRF). The dbEst (database of expressed sequence tags) includes ESTS, short, single pass read cDNA (mRNA) sequences, and cDNA sequences from differential display experiments and RACE experiments.

[0508] BLAST search identified multiple human and mouse ESTs as having sequence closely related to PCCP1. BLAST search also identified one pig EST (AW360379.1) and two cow ESTs (AW359048.1 and BG691595.1) as having sequence closely related to PCCP1.

[0509] Globally, the human PCCP1 protein resembles a human testis-specific chromodomain Y-like protein (GenBank accession: AF_{—}081258.1, the PCCP1 protein with 51% amino acid identity and 64% amino acid similarity over the entire length).

[0510] Motif searches using Pfam (http://pfam.wustl.edu), SMART (http://smart.embl-heidelberg.de), and PROSITE pattern and profile databases (http://www.expasy.ch/prosite), identified several known domains shared with human testis-specific chromodomain Y-like protein.

[0511] FIG. 1 shows the domain structure of PCCP1.

[0512] As schematized in FIG. 1, the newly isolated gene product shares certain protein domains and an overall structural organization with human testis-specific chromodomain Y-like protein. The shared structural features strongly imply that PCCP1 plays a role similar to that of human testis-specific chromodomain Y-like protein, functioning in the regulation of chromosome structure and function, and may also catalyze oxidization of fatty acids.

[0513] Like testis-specific chromodomain Y-like protein, PCCP1 contains the CHROMO (Chromatin organization modifier) domain. In PCCP1, the CHROMO motif ocurrs at amino acids 7-55 (http://www.ncbi.nlm.gov/Structure/cdd/). The CHROMO domain can modify the chromatin structure to the condensed morphology of heterochromatin, and has been shown to be important for chromatin targeting. PCCP1 also contains the ECH (Enoyl-CoA hydratase/isomerase family). In PCCP1, the ECH motif ocurrs at amino acids 273-433. The ECH family contains a diverse set of enzymes which catalyze oxidization of fatty acids.

[0514] Other signatures of the newly isolated PCCP1 protein was identified by searching the PROSITE database (http://www.expasy.ch/tools/scnpsit1.html). These include two N-glycosylation sites (172-175 and 244-247), two cAMP- and cGMP-dependent protein kinase phosphorylation site (326-329 and 416-419), eleven protein kinase C phosphorylation sites (68-70, 74-76, 90-92, 103-105, 121-123, 136-138, 163-165, 240-242, 323-325, 329-331 and 375-377), seven Casein kinase II phosphorylation sites (34-37, 126-129, 163-166, 199-202, 310-313, 419-422, and 470-473), one tyrosine kinase phosphorylation site (224-231), ten N-myristoylation sites (57-62, 127-132, 155-160, 178-183, 204-209, 207 212, 305-310, 311-316, 360-365, and 404-409), and a single amidation site at 414-417.

[0515] Possession of the genomic sequence permitted search for promoter and other control sequences for the PCCP1 gene.

[0516] A putative transcriptional control region, inclusive of promoter and downstream elements, was defined as 1 kb around the transcription start site, itself defined as the first nucleotide of the PCCP1 cDNA clone. The region, drawn from sequence of BAC AC009070.9, has the sequence given in SEQ ID NO: 26, which lists 1000 nucleotides before the transcription start site.

[0517] Transcription factor binding sites were identified using a web based program (http://motif.genome.ad.jp/), including binding sites for MZF1 (365-372 and 651-658), for TCF11 (937-949) and for Sp1 (647-659, with numbering according to SEQ ID NO: 35), amongst others.

[0518] We have thus identified a newly described human gene, PCCP1, which shares certain protein domains and an overall structural organization with human testis-specific chromodomain Y-like protein. The shared structural features strongly imply that the PCCP1 protein plays a role similar to human testis-specific chromodomain Y-like protein. PCCP1 may function in regulating chromosome structure and function, and in catalyzing the oxidization of fatty acids, making the PCCP1 proteins and nucleic acids clinically useful diagnostic markers and potential therapeutic agents for cancer.

### EXAMPLE 2

### Preparation and Labeling of Useful Fragments of PCCP1

[0519] Useful fragments of PCCP1 are produced by PCR, using standard techniques, or solid phase chemical synthesis using an automated nucleic acid synthesizer. Each fragment is sequenced, confirming the exact chemical structure thereof.

[0520] The exact chemical structure of preferred fragments is provided in the attached SEQUENCE LISTING, the disclosure of which is incorporated herein by reference in its entirety. The following summary identifies the fragments whose structures are more fully described in the SEQUENCE LISTING:

[0521] SEQ ID NO: 1 (nt, full length PCCP1 cDNA)

[0522] SEQ ID NO: 2 (nt, cDNA ORF)

[0523] SEQ ID NO: 3 (aa, full length PCCP1 protein)

[0524] SEQ ID NO: 4 (nt, (nt 1-767) portion of PCCP1)

[0525] SEQ ID NO: 5 (nt, 5′ UT portion of SEQ ID NO: 4)

[0526] SEQ ID NO: 6 (nt, coding region of SEQ ID NO: 4)

[0527] SEQ ID NO: 7 (aa (aa 1-225) CDS entirely within SEQ ID NO: 6)

[0528] SEQ ID NO: 8 (nt, (nt 930-1843) portion of PCCP1)

[0529] SEQ ID NO: 9 (nt, coding region of SEQ ID NO: 8)

[0530] SEQ ID NO: 10 (nt, 3′ UT portion of SEQ ID NO: 8)

[0531] SEQ ID NO: 11 (aa, (aa 280-507) CDS entirely within SEQ ID NO: 9)

[0532] SEQ ID NO: 12-18 (nt, exons 1-7 (from genomic sequence))

[0533] SEQ ID NO: 19-25 (nt, 500 bp genomic amplicon centered about exons 1-7)

[0534] SEQ ID NO: 26 (nt, 1000 bp putative promoter)

[0535] SEQ ID NOs: 27-777 (nt, 17-mers scanning SEQ ID NO: 4)

[0536] SEQ ID NOs: 778-1520 (nt, 25-mers scanning SEQ ID NO: 4)

[0537] SEQ ID NOs: 1521-2418 (nt, 17-mers scanning SEQ ID NO: 8)

[0538] SEQ ID NOs: 2419-3308 (nt, 25-mers scanning SEQ ID NO: 8)

[0539] SEQ ID NO: 3309 (nt, forward primer for PCCP1 cloning and RT-PCR analysis of expression)

[0540] SEQ ID NO: 3310 (nt, reverse primer for PCCP1 cloning and RT-PCR analysis of expression)

[0541] SEQ ID NO: 3311 (aa, consensus sequence of the CHROMO motif)

[0542] SEQ ID NO: 3312 (aa, sequence of the PCCP1 CHROMO motif)

[0543] SEQ ID NO: 3313 (aa, sequence of the CHROMO motif of protein 1G6Z_A)

[0544] SEQ ID NO: 3314 (aa, sequence of the CHROMO motif of protein 1AP0)

[0545] SEQ ID NO: 3315 (aa, sequence of the CHROMO motif of protein GI: 3342716)

[0546] SEQ ID NO: 3316 (aa, consensus sequence of the ECH motif)

[0547] SEQ ID NO: 3317 (aa, sequence of the PCCP1 ECH motif)

[0548] SEQ ID NO: 3318 (aa, sequence of the ECH motif of protein 1DUB_D)

[0549] SEQ ID NO: 3319 (aa, sequence of the ECH motif of protein GI: 461983)

[0550] SEQ ID NO: 3320 (aa, sequence of the ECH motif of protein GI: 119118)

[0551] Upon confirmation of the exact structure, each of the above-described nucleic acids of confirmed structure is recognized to be immediately useful as a PCCP1-specific probe.

[0552] For use as labeled nucleic acid probes, the above-described PCCP1 nucleic acids are separately labeled by random priming. As is well known in the art of molecular biology, random priming places the investigator in possession of a near-complete set of labeled fragments of the template of varying length and varying starting nucleotide.

[0553] The labeled probes are used to identify the PCCP1 gene on a Southern blot, and are used to measure expression of PCCP1 mRNA on a northern blot and by RT-PCR, using standard techniques.

### EXAMPLE 3

### RT-PCR Analysis of PCCP1 Expression

[0554] RT-PCR analysis was used to determine the expression pattern of the human PCCP1 gene. A forward primer (5′-TGGAAAGGCTACGGGAGCAC-3′; SEQ ID NO: 3309) and a reverse primer (5′-GGAGTCAAGGCCTTTGGAGGA-3′; SEQ ID NO: 3310) derived from the open reading frame of PCCP1 were used in standard RT-PCRs (Sambrook et al., Molecular cloning: 3rd edition, Cold Spring Harbor Laboratory Press, 2000). Templates for the PCRs were obtained from skeletal muscle, placenta, adrenal gland, lung, kidney, heart, bone marrow, brain, liver, colon tumor, prostate, testis, prostate tumor and reactions were carried out according to the following schedule: 94° C., 20 seconds; 55° C. 20 seconds; 72° C., 60 seconds, for 35 cycles. PCR products were separated on an agarose gel and visualized with a Typhoon™ fluorimager and Imagequant software (Amersham Biosciences, Sunnyvale, Calif.). RT-PCR product for PCCP1 was found to be present highly in prostate, moderately in prostate tumor, colon tumor and testis, weakly in placenta, adrenal gland, lung, bone marrow and brain, but was not found in skeletal muscle, kidney, heart and liver (FIG. 4).

### EXAMPLE 4

### Production of PCCP1 Protein

[0555] The full length PCCP1 cDNA clone is cloned into the mammalian expression vector pcDNA3.1/HISA (Invitrogen, Carlsbad, Calif., USA), transfected into COS7 cells, transfectants selected with G418, and protein expression in transfectants confirmed by detection of the anti-Xpress™ epitope according to manufacturer's instructions. Protein is purified using immobilized metal affinity chromatography and vector-encoded protein sequence is then removed with enterokinase, per manufacturer's instructions, followed by gel filtration and/or HPLC.

[0556] Following epitope tag removal, PCCP1 protein is present at a concentration of at least 70%, measured on a weight basis with respect to total protein (i.e., w/w), and is free of acrylamide monomers, bis acrylamide monomers, polyacrylamide and ampholytes. Further HPLC purification provides PCCP1 protein at a concentration of at least 95%, measured on a weight basis with respect to total protein (i.e., w/w).

### EXAMPLE 5

### Production of Anti-PCCP1 Antibody

[0557] Purified proteins prepared as in Example 4 are conjugated to carrier proteins and used to prepare murine monoclonal antibodies by standard techniques. Initial screening with the unconjugated purified proteins, followed by competitive inhibition screening using peptide fragments of the PCCP1, identifies monoclonal antibodies with specificity for PCCP1.

### EXAMPLE 6

### Use of PCCP1 Probes and Antibodies for Diagnosis and Prognosis of Cancer

[0558] After informed consent is obtained, samples are drawn from normal and tumor tissuses and tested for PCCP1 mRNA levels by standard techniques and tested additionally for PCCP1 protein levels using anti-PCCP1 antibodies in a standard ELISA.

### EXAMPLE 7

### Use of PCCP1 Nucleic Acids, Proteins, and Antibodies in Therapy

[0559] Once over-expression of PCCP1 is detected in-patients, PCCP1 antisense RNA or PCCP1-specific antibody is introduced into disease cells to reduce the amount of the protein.

[0560] Once mutations of PCCP1 have been detected in patients, normal PCCP1 is reintroduced into the patient's disease cells by introduction of expression vectors that drive PCCP1 expression or by introducing PCCP1 proteins into cells. Antibodies for the mutated forms of PCCP1 are used to block the function of the abnormal forms of the protein.

### EXAMPLE 8

### PCCP1 Disease Associations

[0561] In addition to prostate cancer and other tumors, there are a few other diseases that map to the PCCP1 chromosomal region. These diseases are shown in Table 2. Mutations of PCCP1 might lead to the disease(s) listed below. Alternatively, mutations of PCCP1 might lead to some other human disorder(s) as well.

TABLE 2
Diseases mapped to human chromosome 16q

| | | chromosomal |
|---|---|---|
| mim_num | disease | location |
| 177720 | PSEUDOHYPERKALEMIA, FAMILIAL, | 16q23-q24 |
| | DUE TO RED CELL LEAK | |
| 194090 | WILMS TUMOR 3 | 16q |
| 194380 | DEHYDRATED HEREDITARY | 16q23-q24 |
| | STOMATOCYTOSIS | |
| 603528 | DEHYDRATED HEREDITARY | 16q23-q24 |
| | STOMATOCYTOSIS, | |
| | PSEUDOHYPERKALEMIA, | |
| | AND PERINATAL EDEMA | |

[0562] All patents, patent publications, and other published references mentioned herein are hereby incorporated by reference in their entireties as if each had been individually and specifically incorporated by reference herein. While preferred illustrative embodiments of the present invention are described, one skilled in the art will appreciate that the present invention can be practiced by other than the described embodiments, which are presented for purposes of illustration only and not by way of limitation. The present invention is limited only by the claims that follow.

1. An isolated nucleic acid that encodes a protein with a CHROMO domain as well as an ECH domain, comprising:
(a) a nucleotide sequence selected from the group consisting of:
(i) SEQ ID NO: 1;
(ii) the complement of the sequences set forth in (i);
(iii) the nucleotide sequence of SEQ ID NO: 2;
(iv) a degenerate variant of the sequences set forth in (iii); and
(v) the complement of the sequences set forth in (iii) and (iv); or
(b) a nucleotide sequence selected from the group consisting of:
(i) a nucleotide sequence that encodes a polypeptide having the sequence of SEQ ID NO: 3;
(ii) a nucleotide sequence that encodes a polypeptide having the sequence of SEQ ID NO: 3, with conservative amino acid substitutions; and
(iii) the complement of the sequences set forth in (i) and (ii),
wherein said isolated nucleic acid comprising a nucleotide sequence selected from group (b) is no more than about 100 kb in length.

2. The isolated nucleic acid of claim 1 wherein said nucleic acid, or the complement of said nucleic acid, encodes a polypeptide that regulates chromosome structure and function, and also catalyzes oxidization of fatty acids.

3. The isolated nucleic acid of claim 1, wherein said nucleic acid, or the complement of said nucleic acid, is expressed in prostate, testis, colon tumor, prostate tumor, brain, bone marrow, lung, placenta and adrenal gland.

4. A nucleic acid probe, comprising the nucleic acid of claim 1, wherein said probe is no longer than about 100 kb in length.

5. The probe of claim 4, wherein said probe is detectably labeled.

6. The probe of claim 4, attached to a substrate.

7. A microarray, wherein at least one probe of said array is a probe according to claim 4.

8. The isolated nucleic acid molecule of claim 1, wherein said nucleic acid molecule is operably linked to one or more expression control elements.

9. A replicable vector comprising a nucleic acid molecule of claim 1.

10. A replicable vector comprising an isolated nucleic acid molecule of claim 8.

11. A host cell transformed to contain the nucleic acid molecule of claim 1, or the progeny thereof.

12. A method for producing a polypeptide, the method comprising: culturing the host cell of claim 11 under conditions in which the protein encoded by said nucleic acid molecule is expressed.

13. An isolated polypeptide produced by the method of claim 12.

14. An isolated polypeptide, comprising:
(a) an amino acid sequence having the sequence of SEQ ID NO: 3; and
(b) an amino acid sequence having at least 65% amino acid sequence identity to that of (a); or
(c) an amino acid sequence according to (a) in which at least 95% of deviations from the sequence of (a) are conservative substitutions.

15. A fusion protein, said fusion protein comprising a polypeptide of claim 14 fused to a heterologous amino acid sequence.

16. The fusion protein of claim 15, wherein said heterologous amino acid sequence is a detectable moiety.

17. The fusion protein of claim 16, wherein said detectable moiety is fluorescent.

18. The fusion protein of claim 15, wherein said heterologous amino acid sequence is an Ig Fc region.

19. An isolated antibody, or antigen-binding fragment or derivative thereof, the binding of which can be competitively inhibited by a polypeptide of claim 14.

20. A transgenic non-human animal modified to contain the nucleic acid molecule of claim 1.

21. A transgenic non-human animal unable to express the endogenous orthologue of the nucleic acid molecule of claim 1.

22. A method of identifying agents that modulate the expression of PCCP1, the method comprising:
contacting a cell or tissue sample believed to express PCCP1 with a chemical or biological agent, and then
comparing the amount of PCCP1 expression in said cell or tissue sample with that of a control,
changes in the amount relative to control identifying an agent that modulates expression of PCCP1.

23. A method of identifying agonists and antagonists of PCCP1, the method comprising:
contacting a cell or tissue sample believed to express PCCP1 with a chemical or biological agent, and then
comparing the activity of PCCP1 with that of a control,
increased activity relative to a control identifying an agonist, decreased activity relative to a control identifying an antagonist.

24. A purified agonist of the polypeptide of claim 14.

25. A purified antagonist of the polypeptide of claim 14.

26. A method of identifying a specific binding partner for a polypeptide according to claim 14, the method comprising:
contacting said polypeptide to a potential binding partner; and
determining if the potential binding partner binds to said polypeptide.

27. The method of claim 26, wherein said contacting is performed in vivo.

28. A purified binding partner of the polypeptide of claim 14.

29. A method for detecting a target nucleic acid in a sample, said target being a nucleic acid according to claim 1, the method comprising:
(a) hybridizing the sample with a probe comprising at least 17 contiguous nucleotides of a sequence complementary to said target nucleic acid in said sample under high stringency hybridization conditions, and
(b) detecting the presence or absence, and optionally the amount, of said binding.

30. A method of diagnosing a disease caused by mutation in PCCP1, comprising:
detecting said mutation in a sample of nucleic acids that derives from a subject suspected to have said disease.

31. A method of diagnosing or monitoring a disease caused by altered expression of PCCP1, comprising:
determining the level of expression of PCCP1 in a sample of nucleic acids or proteins that derives from a subject suspected to have said disease,
alterations from a normal level of expression providing diagnostic and/or monitoring information.

32. A diagnostic composition comprising the nucleic acid of claim 1, said nucleic acid being detectably labeled.

33. The diagnostic composition of claim 32, wherein said composition is further suitable for in vivo administration.

34. A diagnostic composition comprising the polypeptide of claim 14, said polypeptide being detectably labeled.

35. The diagnostic composition of claim 34, wherein said composition is further suitable for in vivo administration.

36. A diagnostic composition comprising the antibody, or antigen-binding fragment or derivative thereof, of claim 19.

37. The diagnostic composition of claim 36, wherein said antibody or antigen-binding fragment or derivative thereof is detectably labeled.

38. The diagnostic composition of claim 37, wherein said composition is further suitable for in vivo administration.

39. A pharmaceutical composition comprising the nucleic acid of claim 1 and a pharmaceutically acceptable excipient.

40. A pharmaceutical composition comprising the polypeptide of claim 14 and a pharmaceutically acceptable excipient.

41. A pharmaceutical composition comprising the antibody or antigen-binding fragment or derivative thereof of claim 19 and a pharmaceutically acceptable excipient.

42. A pharmaceutical composition comprising the agonist of claim 24 and a pharmaceutically acceptable excipient.

43. A pharmaceutical composition comprising the antagonist of claim 25 and a pharmaceutically acceptable excipient.

44. A method for treating or preventing a disorder associated with decreased expression or activity of PCCP1, the method comprising administering to a subject in need of such treatment an effective amount of the pharmaceutical composition of claim 39.

45. A method for treating or preventing a disorder associated with increased expression or activity of PCCP1, the method comprising administering to a subject in need of such treatment an effective amount of the pharmaceutical composition of claim 41.

46. A method of modulating the expression of a nucleic acid according to claim 1, the method comprising:
administering an effective amount of an agent which modulates the expression of a nucleic acid according to claim 1.

47. A method of modulating at least one activity of a polypeptide according to claim 14, the method comprising:
administering an effective amount of an agent which modulates at least one activity of a polypeptide according to claim 14.

The application's sequence listing, which the Patent Office published only in electronic form, follows.

SEQUENCE LISTING (3320 sequences)

SEQ ID NO: 1 - DNA, 2088 bp, Homo sapiens
cacacgcgcacatcggtaccccgcgcgcacacgcacggagggctgcgagcgagcagacgcgcacaccggcgagccaagttccgcagcctggcatggcttctggggacctttacgaggttgaaaggattgtagacaagaggaagaacaagaaaggaaaatgggagtatcttatccgatggaaaggctacgggagcaccgaggacacgtgggagccggagcaccacctcttgcactgtgaggagtttattgatgaattcaatgggttgcacatgtccaaggacaagaggatcaagtcagggaagcagtccagtacctccaagctgctgcgtgacagtcgaggcccgtcggttgagaaactgtcccacagaccttcagatcctggaaagagcaaggggacctcccataaacggaagcgaattaaccctcccctggccaagccaaaaaaagggtattcaggcaagccctcttcaggaggtgacagggccaccaagacggtgtcttacaggactacccccagtggtttgcaaataatgcccctgaaaaagtctcagaacgggatggaaaatggggacgccggctctgagaaggatgagaggcactttggaaatgggtcccatcagcctggcttggatttgaatgatcatgttggagagcaagatatgggtgaatgtgacgtgaatcacgctacactggcggagaacgggctcggtggctctgctctgaccaacgggggattgaacctgcacagtccagtgaagaggaagctggaagcggagaaggactacgtctttgacaaaaggctcagatacagtgtccgccagaatgaaagcaactgtcggtttcgagacatcgttgtgcggaaggaagaagggttcacgcacatcctgctgtccagtcagacctcggataacaatgccctgacacctgagatcatgaaagaagtccggcgagcgctctgcaacgcagccacagacgacagcaaactgctgctcctcagcgcagtggggagcgtgttctgcagcggcctggattattcctacctaattggccggttgtccagcgaccggcgaaaggagagcactcggattgcagaagccatcagggactttgtgaaggcctttatccagtttaagaagcctatcgtggtggccatcaatgggccggccctgggcctgggtgcctccatcctgcccctctgtgacatcgtgtgggccagtgagaaggcctggttccagacgccctacgccaccatccgcctcacgcctgctggctgctcctcctacaccttcccccagatcctgggcgtcgcgctggccaatgagatgctgttctgtgggcggaagctcaccgcccaggaggcctgcagcagggggctggtgtcgcaggtcttctggcccaccacgttcagccaggaggtcatgctgcgggtcaaggagatggcatcctgcagtgccgtggtgttagaggagtccaaatgcctcgtgcggagcttcctgaaatcagtgctggaagacgtgaacgagaaggaatgcctcatgctcaagcagctctggagctcctccaaaggccttgactcccttttcagctacctgcaggacaaaatttatgaagtctgaggggccccagctcacgggcccccaacttccagctctgccctgtgtttcggaaaccagagcacagtgtctgccccggccaaggagtttgtcaaggtgtctctttatacgtagggttgtgtccatttcctcgtgtcctttggttgctcctccttggtttgattttgtgtaatggatggaaaacgcagcatacttggcctcccccacctccctgcccttcctggccagagagctgtccaaggctgtatcttcccagggctccgccaagcaccgctgtcctttccccacttgctgaaatgcaccatgacggtccaggaaggggaagaccactttcacattcttctgactcaggctgtgtctacacagtgcctctgacttggagacttggccatcatggctctctctggttgtatttagatcgggtgtcagaggacgaccaatcttagggaatttccagaccaatgagcaaaatgat

SEQ ID NO: 2 - DNA, 1524 bp, Homo sapiens
atggcttctggggacctttacgaggttgaaaggattgtagacaagaggaagaacaagaaaggaaaatgggagtatcttatccgatggaaaggctacgggagcaccgaggacacgtgggagccggagcaccacctcttgcactgtgaggagtttattgatgaattcaatgggttgcacatgtccaaggacaagaggatcaagtcagggaagcagtccagtacctccaagctgctgcgtgacagtcgaggcccgtcggttgagaaactgtcccacagaccttcagatcctggaaagagcaaggggacctcccataaacggaagcgaattaaccctcccctggccaagccaaaaaaagggtattcaggcaagccctcttcaggaggtgacagggccaccaagacggtgtcttacaggactacccccagtggtttgcaaataatgcccctgaaaaagtctcagaacgggatggaaaatggggacgccggctctgagaaggatgagaggcactttggaaatgggtcccatcagcctggcttggatttgaatgatcatgttggagagcaagatatgggtgaatgtgacgtgaatcacgctacactggcggagaacgggctcggtggctctgctctgaccaacgggggattgaacctgcacagtccagtgaagaggaagctggaagcggagaaggactacgtctttgacaaaaggctcagatacagtgtccgccagaatgaaagcaactgtcggtttcgagacatcgttgtgcggaaggaagaagggttcacgcacatcctgctgtccagtcagacctcggataacaatgccctgacacctgagatcatgaaagaagtccggcgagcgctctgcaacgcagccacagacgacagcaaactgctgctcctcagcgcagtggggagcgtgttctgcagcggcctggattattcctacctaattggccggttgtccagcgaccggcgaaaggagagcactcggattgcagaagccatcagggactttgtgaaggcctttatccagtttaagaagcctatcgtggtggccatcaatgggccggccctgggcctgggtgcctccatcctgcccctctgtgacatcgtgtgggccagtgagaaggcctggttccagacgccctacgccaccatccgcctcacgcctgctggctgctcctcctacaccttcccccagatcctgggcgtcgcgctggccaatgagatgctgttctgtgggcggaagctcaccgcccaggaggcctgcagcagggggctggtgtcgcaggtcttctggcccaccacgttcagccaggaggtcatgctgcgggtcaaggagatggcatcctgcagtgccgtggtgttagaggagtccaaatgcctcgtgcggagcttcctgaaatcagtgctggaagacgtgaacgagaaggaatgcctcatgctcaagcagctctggagctcctccaaaggccttgactcccttttcagctacctgcaggacaaaatttatgaagtctga

SEQ ID NO: 3 - protein, 507 aa, Homo sapiens
MASGDLYEVERIVDKRKNKKGKWEYLIRWKGYGSTEDTWEPEHHLLHCEEFIDEFNGLHMSKDKRIKSGKQSSTSKLLRDSRGPSVEKLSHRPSDPGKSKGTSHKRKRINPPLAKPKKGYSGKPSSGGDRATKTVSYRTTPSGLQIMPLKKSQNGMENGDAGSEKDERHFGNGSHQPGLDLNDHVGEQDMGECDVNHATLAENGLGGSALTNGGLNLHSPVKRKLEAEKDYVFDKRLRYSVRQNESNCRFRDIVVRKEEGFTHILLSSQTSDNNALTPEIMKEVRRALCNAATDDSKLLLLSAVGSVFCSGLDYSYLIGRLSSDRRKESTRIAEAIRDFVKAFIQFKKPIVVAINGPALGLGASILPLCDIVWASEKAWFQTPYATIRLTPAGCSSYTFPQILGVALANEMLFCGRKLTAQEACSRGLVSQVFWPTTFSQEVMLRVKEMASCSAVVLEESKCLVRSFLKSVLEDVNEKECLMLKQLWSSSKGLDSLFSYLQDKIYEV

SEQ ID NO: 4 - DNA, 767 bp, Homo sapiens
cacacgcgcacatcggtaccccgcgcgcacacgcacggagggctgcgagcgagcagacgcgcacaccggcgagccaagttccgcagcctggcatggcttctggggacctttacgaggttgaaaggattgtagacaagaggaagaacaagaaaggaaaatgggagtatcttatccgatggaaaggctacgggagcaccgaggacacgtgggagccggagcaccacctcttgcactgtgaggagtttattgatgaattcaatgggttgcacatgtccaaggacaagaggatcaagtcagggaagcagtccagtacctccaagctgctgcgtgacagtcgaggcccgtcggttgagaaactgtcccacagaccttcagatcctggaaagagcaaggggacctcccataaacggaagcgaattaaccctcccctggccaagccaaaaaaagggtattcaggcaagccctcttcaggaggtgacagggccaccaagacggtgtcttacaggactacccccagtggtttgcaaataatgcccctgaaaaagtctcagaacgggatggaaaatggggacgccggctctgagaaggatgagaggcactttggaaatgggtcccatcagcctggcttggatttgaatgatcatgttggagagcaagatatgggtgaatgtgacgtgaatcacgctacactggcggagaacgggctcggtggctctgctctgaccaacgggggattgaacctgcacagtccagtgaagaggaagctg

SEQ ID NO: 5 - DNA, 92 bp, Homo sapiens
cacacgcgcacatcggtaccccgcgcgcacacgcacggagggctgcgagcgagcagacgcgcacaccggcgagccaagttccgcagcctggc

SEQ ID NO: 6 - DNA, 675 bp, Homo sapiens
atggcttctggggacctttacgaggttgaaaggattgtagacaagaggaagaacaagaaaggaaaatgggagtatcttatccgatggaaaggctacgggagcaccgaggacacgtgggagccggagcaccacctcttgcactgtgaggagtttattgatgaattcaatgggttgcacatgtccaaggacaagaggatcaagtcagggaagcagtccagtacctccaagctgctgcgtgacagtcgaggcccgtcggttgagaaactgtcccacagaccttcagatcctggaaagagcaaggggacctcccataaacggaagcgaattaaccctcccctggccaagccaaaaaaagggtattcaggcaagccctcttcaggaggtgacagggccaccaagacggtgtcttacaggactacccccagtggtttgcaaataatgcccctgaaaaagtctcagaacgggatggaaaatggggacgccggctctgagaaggatgagaggcactttggaaatgggtcccatcagcctggcttggatttgaatgatcatgttggagagcaagatatgggtgaatgtgacgtgaatcacgctacactggcggagaacgggctcggtggctctgctctgaccaacgggggattgaacctgcacagtccagtgaagaggaagctg

SEQ ID NO: 7 - protein, 225 aa, Homo sapiens
MASGDLYEVERIVDKRKNKKGKWEYLIRWKGYGSTEDTWEPEHHLLHCEEFIDEFNGLHMSKDKRIKSGKQSSTSKLLRDSRGPSVEKLSHRPSDPGKSKGTSHKRKRINPPLAKPKKGYSGKPSSGGDRATKTVSYRTTPSGLQIMPLKKSQNGMENGDAGSEKDERHFGNGSHQPGLDLNDHVGEQDMGECDVNHATLAENGLGGSALTNGGLNLHSPVKRKL

SEQ ID NO: 8 - DNA, 914 bp, Homo sapiens
atcatgaaagaagtccggcgagcgctctgcaacgcagccacagacgacagcaaactgctgctcctcagcgcagtggggagcgtgttctgcagcggcctggattattcctacctaattggccggttgtccagcgaccggcgaaaggagagcactcggattgcagaagccatcagggactttgtgaaggcctttatccagtttaagaagcctatcgtggtggccatcaatgggccggccctgggcctgggtgcctccatcctgcccctctgtgacatcgtgtgggccagtgagaaggcctggttccagacgccctacgccaccatccgcctcacgcctgctggctgctcctcctacaccttcccccagatcctgggcgtcgcgctggccaatgagatgctgttctgtgggcggaagctcaccgcccaggaggcctgcagcagggggctggtgtcgcaggtcttctggcccaccacgttcagccaggaggtcatgctgcgggtcaaggagatggcatcctgcagtgccgtggtgttagaggagtccaaatgcctcgtgcggagcttcctgaaatcagtgctggaagacgtgaacgagaaggaatgcctcatgctcaagcagctctggagctcctccaaaggccttgactcccttttcagctacctgcaggacaaaatttatgaagtctgaggggccccagctcacgggcccccaacttccagctctgccctgtgtttcggaaaccagagcacagtgtctgccccggccaaggagtttgtcaaggtgtctctttatacgtagggttgtgtccatttcctcgtgtcctttggttgctcctccttggtttgattttgtgtaatggatggaaaacgcagcatacttggcctcccccacctccctgcccttcctggccagag

SEQ ID NO: 9 - DNA, 687 bp, Homo sapiens
atcatgaaagaagtccggcgagcgctctgcaacgcagccacagacgacagcaaactgctgctcctcagcgcagtggggagcgtgttctgcagcggcctggattattcctacctaattggccggttgtccagcgaccggcgaaaggagagcactcggattgcagaagccatcagggactttgtgaaggcctttatccagtttaagaagcctatcgtggtggccatcaatgggccggccctgggcctgggtgcctccatcctgcccctctgtgacatcgtgtgggccagtgagaaggcctggttccagacgccctacgccaccatccgcctcacgcctgctggctgctcctcctacaccttcccccagatcctgggcgtcgcgctggccaatgagatgctgttctgtgggcggaagctcaccgcccaggaggcctgcagcagggggctggtgtcgcaggtcttctggcccaccacgttcagccaggaggtcatgctgcgggtcaaggagatggcatcctgcagtgccgtggtgttagaggagtccaaatgcctcgtgcggagcttcctgaaatcagtgctggaagacgtgaacgagaaggaatgcctcatgctcaagcagctctggagctcctccaaaggccttgactcccttttcagctacctgcaggacaaaatttatgaagtctga

SEQ ID NO: 10 - DNA, 227 bp, Homo sapiens
ggggccccagctcacgggcccccaacttccagctctgccctgtgtttcggaaaccagagcacagtgtctgccccggccaaggagtttgtcaaggtgtctctttatacgtagggttgtgtccatttcctcgtgtcctttggttgctcctccttggtttgattttgtgtaatggatggaaaacgcagcatacttggcctcccccacctccctgcccttcctggccagag

SEQ ID NO: 11 - protein, 228 aa, Homo sapiens
IMKEVRRALCNAATDDSKLLLLSAVGSVFCSGLDYSYLIGRLSSDRRKESTRIAEAIRDFVKAFIQFKKPIVVAINGPALGLGASILPLCDIVWASEKAWFQTPYATIRLTPAGCSSYTFPQILGVALANEMLFCGRKLTAQEACSRGLVSQVFWPTTFSQEVMLRVKEMASCSAVVLEESKCLVRSFLKSVLEDVNEKECLMLKQLWSSSKGLDSLFSYLQDKIYEV

SEQ ID NO: 12 - DNA, 116 bp, Homo sapiens
cacacgcgcacatcggtaccccgcgcgcacacgcacggagggctgcgagcgagcagacgcgcacaccggcgagccaagttccgcagcctggcatggcttctggggacctttacgag

SEQ ID NO: 13 - DNA, 594 bp, Homo sapiens
gttgaaaggattgtagacaagaggaagaacaagaaaggaaaatgggagtatcttatccgatggaaaggctacgggagcaccgaggacacgtgggagccggagcaccacctcttgcactgtgaggagtttattgatgaattcaatgggttgcacatgtccaaggacaagaggatcaagtcagggaagcagtccagtacctccaagctgctgcgtgacagtcgaggcccgtcggttgagaaactgtcccacagaccttcagatcctggaaagagcaaggggacctcccataaacggaagcgaattaaccctcccctggccaagccaaaaaaagggtattcaggcaagccctcttcaggaggtgacagggccaccaagacggtgtcttacaggactacccccagtggtttgcaaataatgcccctgaaaaagtctcagaacgggatggaaaatggggacgccggctctgagaaggatgagaggcactttggaaatgggtcccatcagcctggcttggatttgaatgatcatgttggagagcaagatatgggtgaatgtgacgtgaatcacgctacactggcggagaacgggctcggt

SEQ ID NO: 14 - DNA, 219 bp, Homo sapiens
ggctctgctctgaccaacgggggattgaacctgcacagtccagtgaagaggaagctggaagcggagaaggactacgtctttgacaaaaggctcagatacagtgtccgccagaatgaaagcaactgtcggtttcgagacatcgttgtgcggaaggaagaagggttcacgcacatcctgctgtccagtcagacctcggataacaatgccctgacacctgag

SEQ ID NO: 15 - DNA, 173 bp, Homo sapiens
atcatgaaagaagtccggcgagcgctctgcaacgcagccacagacgacagcaaactgctgctcctcagcgcagtggggagcgtgttctgcagcggcctggattattcctacctaattggccggttgtccagcgaccggcgaaaggagagcactcggattgcagaagccatcag

SEQ ID NO: 16 - DNA, 211 bp, Homo sapiens
ggactttgtgaaggcctttatccagtttaagaagcctatcgtggtggccatcaatgggccggccctgggcctgggtgcctccatcctgcccctctgtgacatcgtgtgggccagtgagaaggcctggttccagacgccctacgccaccatccgcctcacgcctgctggctgctcctcctacaccttcccccagatcctgggcgtcgcgctg

SEQ ID NO: 17 - DNA, 144 bp, Homo sapiens
gccaatgagatgctgttctgtgggcggaagctcaccgcccaggaggcctgcagcagggggctggtgtcgcaggtcttctggcccaccacgttcagccaggaggtcatgctgcgggtcaaggagatggcatcctgcagtgccgtg

SEQ ID NO: 18 - DNA, 631 bp, Homo sapiens
gtgttagaggagtccaaatgcctcgtgcggagcttcctgaaatcagtgctggaagacgtgaacgagaaggaatgcctcatgctcaagcagctctggagctcctccaaaggccttgactcccttttcagctacctgcaggacaaaatttatgaagtctgaggggccccagctcacgggcccccaacttccagctctgccctgtgtttcggaaaccagagcacagtgtctgccccggccaaggagtttgtcaaggtgtctctttatacgtagggttgtgtccatttcctcgtgtcctttggttgctcctccttggtttgattttgtgtaatggatggaaaacgcagcatacttggcctcccccacctccctgcccttcctggccagagagctgtccaaggctgtatcttcccagggctccgccaagcaccgctgtcctttccccacttgctgaaatgcaccatgacggtccaggaaggggaagaccactttcacattcttctgactcaggctgtgtctacacagtgcctctgacttggagacttggccatcatggctctctctggttgtatttagatcgggtgtcagaggacgaccaatcttagggaatttccagaccaatgagcaaaatgat

SEQ ID NO: 19 - DNA, 499 bp, Homo sapiens
cgctcgggccgcgtccgtgcctcccgggcgcgctgcgcggccgtcgctgctgcccgcgctcgtgccgccgccgccgccgccgccgctgctgccggttacgccagccccgccgccgcccgctctgattctgcgcataggcagcccccaagcctgtcattctgcaaaaacacagtttactcaacacaccacacacactcgcacacacacgcgcgcacacacacgcgcacaccggaccccgcgcgcacacgcacggagggcgcgagcgagcagacgcgcacaccggcgagccaagttccgcagcctggcatggcttctggggacctttacgaggtacggggacgcgggggcgcgggccggccccagtcagcgggcggcggcgggcggcggcggcgggcggcggggaccgggccggggccggggccgggcgcaatccggagttgccgagcccgcggcggcggcggcggcggccggagggtggcgggggccgggcgcgcctccc

SEQ ID NO: 20 - DNA, 500 bp, Homo sapiens
tatcttatccgatggaaaggctacgggagcaccgaggacacgtgggagccggagcaccacctcttgcactgtgaggagtttattgatgaattcaatgggttgcacatgtccaaggacaagaggatcaagtcagggaagcagtccagtacctccaagctgctgcgtgacagtcgaggcccgtcggttgagaaactgtcccacagaccttcagatcctggaaagagcaaggggacctcccataaacggaagcgaattaaccctcccctggccaagccaaaaaaagggtattcaggcaagccctcttcaggaggtgacagggccaccaagacggtgtcttacaggactacccccagtggtttgcaaataatgcccctgaaaaagtctcagaacgggatggaaaatggggacgccggctctgagaaggatgagaggcactttggaaatgggtcccatcagcctggcttggatttgaatgatcatgttggagagcaagatatggg

SEQ ID NO: 21 - DNA, 500 bp, Homo sapiens
acagagggtggcacaggggagaaggtggtgtgtcccagcacatccaaacctttccattggaaatcccaacgtcctctgatcacatccttctaggatcgtggtccatttcagtttcttacattgtttatctggttttggaaggctctgctctgaccaacgggggattgaacctgcacagtccagtgaagaggaagctggaagcggagaaggactacgtctttgacaaaaggctcagatacagtgtccgccagaatgaaagcaactgtcggtttcgagacatcgttgtgcggaaggaagaagggttcacgcacatcctgctgtccagtcagacctcggataacaatgccctgacacctgaggtaaggggtggcggccagagggaagggcaagctgggctgtggctccttctcactcagaatggaatattggctttctccttccttccatcagggagctgaggatggtaactagcgtgcataaaaacttgactgcagcgcgca

SEQ ID NO: 22 - DNA, 500 bp, Homo sapiens
ctggactcttgcttgtactcaggggaggctccctgcacaggcagaagcagattccctggcctctaccctcagggggtcaggcctctggctgtcttgcagtctgaaagccccaggcttacaggatagacacttaacatccctgcaaattcatctctgccggcagatcatgaaagaagtccggcgagcgctctgcaacgcagccacagacgacagcaaactgctgctcctcagcgcagtggggagcgtgttctgcagcggcctggattattcctacctaattggccggttgtccagcgaccggcgaaaggagagcactcggattgcagaagccatcaggtgagctgtgctccttttcacacaccctggggtcctgcgtaggattaccaagtaaaaatacaggctgctcagttaaattcgaatttcaaacaaccaggaattttatttttagcataagtatatcctgtgcaatactcgaggtctgcttacatttttaaaatgtt

SEQ ID NO: 23 - DNA, 500 bp, Homo sapiens
gtccaggcaatgaggcccttgcctggcacctctaacctctgacgacctgagggtgctcctcacagcacctgggagagtcaagggttccagtggggcttagcatgctatagtcacctgttcaagaggatcttctttctctcccagggactttgtgaaggcctttatccagtttaagaagcctatcgtggtggccatcaatgggccggccctgggcctgggtgcctccatcctgcccctctgtgacatcgtgtgggccagtgagaaggcctggttccagacgccctacgccaccatccgcctcacgcctgctggctgctcctcctacaccttcccccagatcctgggcgtcgcgctggtaagcctcctgtgatacctggattcgggtcccagcaggatccttcctctgccttgggtttaggggctcttcatggggctagaaacctgagggtgttgtcagcctgcagattggcttggctgcctcatgtccttcacaccttcag

SEQ ID NO: 24 - DNA, 500 bp, Homo sapiens
gcacacgaacatttccatacaattcccaaagcttatctgaccccaaaataagataaggatctggaaggcaagatgccttccagaactgggatggttgcaggtggcaagccctggaccagctgagggacatgggtggacctccaggccctcagtctttgcctgcttttgctttttcaggccaatgagatgctgttctgtgggcggaagctcaccgcccaggaggcctgcagcagggggctggtgtcgcaggtcttctggcccaccacgttcagccaggaggtcatgctgcgggtcaaggagatggcatcctgcagtgccgtggtgagttcctgcgcctcctgcgtgcttgtccttttgatagacccattttacacatgaagacagcaaggctcagagggcttcactgacttgctagaggtcgcacagggaataagcaaaagaccctttgcaatttaacaaatgccttttctcagtattgacagcttcaatcagagggagac

SEQ ID NO: 25 - DNA, 500 bp, Homo sapiens
aaggaatgcctcatgctcaagcagctctggagctcctccaaaggccttgactcccttttcagctacctgcaggacaaaatttatgaagtctgaggggccccagctcacgggcccccaacttccagctctgccctgtgtttcggaaaccagagcacagtgtctgccccggccaaggagtttgtcaaggtgtctctttatacgtagggttgtgtccatttcctcgtgtcctttggttgctcctccttggtttgattttgtgtaatggatggaaaacgcagcatacttggcctcccccacctccctgcccttcctggccagagagctgtccaaggctgtatcttcccagggctccgccaagcaccgctgtcctttccccacttgctgaaatgcaccatgacggtccaggaaggggaagaccactttcacattcttctgactcaggctgtgtctacacagtgcctctgacttggagacttggccatcatggctctctctggttg

SEQ ID NO: 26 - DNA, 1000 bp, Homo sapiens
tgagtgctccattacactcctcacttgcggattcaaactgtctctgggcagggtcccagttttgcctgtccagggacactgtgcacttgggttgactttggtaaatgtttgagtaagggatgagtgaataaattcggggagaggggttgttgagggaaggccacccctggctctaaagactttccagggtttatggggtggccacgcctgtcctggatccccatggtgcctctggatgggccatttcatccttcctccctgtggcctccacatcttacaacccagcctggagggaggggccgcgcagccccgaggggccaggtctcccaggcggcgtccactcccctcgagggtggaggaggtaggtggggaccccgggccggcggggctcggctggggccccttccctgaggtctgcagccgcagccctctacctggctccccggccgccccttcgcggccccagatcgggcgcacccggcgggcacctggcccgccgccccccgggggccccgccagctgctcccgaagccggcccggggtggcggggcgggcccgagcgctagtcgactctgggaccggtcccccggggcgcggccgggcagcagcccccgcctccccgccccgggggccgggccgggctcccggggggcggggactcgcccagtggcagcagcgtccgggccggcggcgggcgccgggcggcttcctgcaggcggcgccggggcgagccgttgccggctgcagccaccgccgccgggtcgccgggtcgcgggggccgcggcgctcgggccgcgtccgtgcctcccgggcgcgctgcgcggccgtcgctgctgcccgcgctcgtgccgccgccgccgccgccgccgctgctgccggttacgccagccccgccgccgcccgctctgattctgcgcataggcagcccccaagcctgtcattctgcaaaaacacagtttactcaacacaccacacacactcgcacacacacgcgcgcaca

SEQ ID NO: 27 - DNA, 17 bp, Homo sapiens
cacacgcgcacatcggt

SEQ ID NO: 28 - DNA, 17 bp, Homo sapiens
acacgcgcacatcggta

SEQ ID NO: 29 - DNA, 17 bp, Homo sapiens
cacgcgcacatcggtac

SEQ ID NO: 30 - DNA, 17 bp, Homo sapiens
acgcgcacatcggtacc

SEQ ID NO: 31 - DNA, 17 bp, Homo sapiens
cgcgcacatcggtaccc

SEQ ID NO: 32 - DNA, 17 bp, Homo sapiens
gcgcacatcggtacccc

SEQ ID NO: 33 - DNA, 17 bp, Homo sapiens
cgcacatcggtaccccg

SEQ ID NO: 34 - DNA, 17 bp, Homo sapiens
gcacatcggtaccccgc

SEQ ID NO: 35 - DNA, 17 bp, Homo sapiens
cacatcggtaccccgcg

SEQ ID NO: 36 - DNA, 17 bp, Homo sapiens
acatcggtaccccgcgc

SEQ ID NO: 37 - DNA, 17 bp, Homo sapiens
catcggtaccccgcgcg

SEQ ID NO: 38 - DNA, 17 bp, Homo sapiens
atcggtaccccgcgcgc

SEQ ID NO: 39 - DNA, 17 bp, Homo sapiens
tcggtaccccgcgcgca

SEQ ID NO: 40 - DNA, 17 bp, Homo sapiens
cggtaccccgcgcgcac

SEQ ID NO: 41 - DNA, 17 bp, Homo sapiens
ggtaccccgcgcgcaca

SEQ ID NO: 42 - DNA, 17 bp, Homo sapiens
gtaccccgcgcgcacac

SEQ ID NO: 43 - DNA, 17 bp, Homo sapiens
taccccgcgcgcacacg

SEQ ID NO: 44 - DNA, 17 bp, Homo sapiens
accccgcgcgcacacgc

SEQ ID NO: 45 - DNA, 17 bp, Homo sapiens
ccccgcgcgcacacgca

SEQ ID NO: 46 - DNA, 17 bp, Homo sapiens
cccgcgcgcacacgcac

SEQ ID NO: 47 - DNA, 17 bp, Homo sapiens
ccgcgcgcacacgcacg

SEQ ID NO: 48 - DNA, 17 bp, Homo sapiens
cgcgcgcacacgcacgg

SEQ ID NO: 49 - DNA, 17 bp, Homo sapiens
gcgcgcacacgcacgga

SEQ ID NO: 50 - DNA, 17 bp, Homo sapiens
cgcgcacacgcacggag

SEQ ID NO: 51 - DNA, 17 bp, Homo sapiens
gcgcacacgcacggagg

SEQ ID NO: 52 - DNA, 17 bp, Homo sapiens
cgcacacgcacggaggg

SEQ ID NO: 53 - DNA, 17 bp, Homo sapiens
gcacacgcacggagggc

SEQ ID NO: 54 - DNA, 17 bp, Homo sapiens
cacacgcacggagggct

SEQ ID NO: 55 - DNA, 17 bp, Homo sapiens
acacgcacggagggctg

SEQ ID NO: 56 - DNA, 17 bp, Homo sapiens
cacgcacggagggctgc

SEQ ID NO: 57 - DNA, 17 bp, Homo sapiens
acgcacggagggctgcg

SEQ ID NO: 58 - DNA, 17 bp, Homo sapiens
cgcacggagggctgcga

SEQ ID NO: 59 - DNA, 17 bp, Homo sapiens
gcacggagggctgcgag

SEQ ID NO: 60 - DNA, 17 bp, Homo sapiens
cacggagggctgcgagc

SEQ ID NO: 61 - DNA, 17 bp, Homo sapiens
acggagggctgcgagcg

SEQ ID NO: 62 - DNA, 17 bp, Homo sapiens
cggagggctgcgagcga

SEQ ID NO: 63 - DNA, 17 bp, Homo sapiens
ggagggctgcgagcgag

SEQ ID NO: 64 - DNA, 17 bp, Homo sapiens
gagggctgcgagcgagc

SEQ ID NO: 65 - DNA, 17 bp, Homo sapiens
agggctgcgagcgagca

SEQ ID NO: 66 - DNA, 17 bp, Homo sapiens
gggctgcgagcgagcag

SEQ ID NO: 67 - DNA, 17 bp, Homo sapiens
ggctgcgagcgagcaga

SEQ ID NO: 68 - DNA, 17 bp, Homo sapiens
gctgcgagcgagcagac

SEQ ID NO: 69 - DNA, 17 bp, Homo sapiens
ctgcgagcgagcagacg

SEQ ID NO: 70 - DNA, 17 bp, Homo sapiens
tgcgagcgagcagacgc

SEQ ID NO: 71 - DNA, 17 bp, Homo sapiens
gcgagcgagcagacgcg

SEQ ID NO: 72 - DNA, 17 bp, Homo sapiens
cgagcgagcagacgcgc

SEQ ID NO: 73 - DNA, 17 bp, Homo sapiens
gagcgagcagacgcgca

SEQ ID NO: 74 - DNA, 17 bp, Homo sapiens
agcgagcagacgcgcac

SEQ ID NO: 75 - DNA, 17 bp, Homo sapiens
gcgagcagacgcgcaca

SEQ ID NO: 76 - DNA, 17 bp, Homo sapiens
cgagcagacgcgcacac

SEQ ID NO: 77 - DNA, 17 bp, Homo sapiens
gagcagacgcgcacacc

SEQ ID NO: 78 - DNA, 17 bp, Homo sapiens
agcagacgcgcacaccg

SEQ ID NO: 79 - DNA, 17 bp, Homo sapiens
gcagacgcgcacaccgg

SEQ ID NO: 80 - DNA, 17 bp, Homo sapiens
cagacgcgcacaccggc

SEQ ID NO: 81 - DNA, 17 bp, Homo sapiens
agacgcgcacaccggcg

SEQ ID NO: 82 - DNA, 17 bp, Homo sapiens
gacgcgcacaccggcga

SEQ ID NO: 83 - DNA, 17 bp, Homo sapiens
acgcgcacaccggcgag

SEQ ID NO: 84 - DNA, 17 bp, Homo sapiens
cgcgcacaccggcgagc

SEQ ID NO: 85 - DNA, 17 bp, Homo sapiens
gcgcacaccggcgagcc

SEQ ID NO: 86 - DNA, 17 bp, Homo sapiens
cgcacaccggcgagcca

SEQ ID NO: 87 - DNA, 17 bp, Homo sapiens
gcacaccggcgagccaa

SEQ ID NO: 88 - DNA, 17 bp, Homo sapiens
cacaccggcgagccaag

SEQ ID NO: 89 - DNA, 17 bp, Homo sapiens
acaccggcgagccaagt

SEQ ID NO: 90 - DNA, 17 bp, Homo sapiens
caccggcgagccaagtt

SEQ ID NO: 91 - DNA, 17 bp, Homo sapiens
accggcgagccaagttc

SEQ ID NO: 92 - DNA, 17 bp, Homo sapiens
ccggcgagccaagttcc

SEQ ID NO: 93 - DNA, 17 bp, Homo sapiens
cggcgagccaagttccg

SEQ ID NO: 94 - DNA, 17 bp, Homo sapiens
ggcgagccaagttccgc

SEQ ID NO: 95 - DNA, 17 bp, Homo sapiens
gcgagccaagttccgca

SEQ ID NO: 96 - DNA, 17 bp, Homo sapiens
cgagccaagttccgcag

SEQ ID NO: 97 - DNA, 17 bp, Homo sapiens
gagccaagttccgcagc

SEQ ID NO: 98 - DNA, 17 bp, Homo sapiens
agccaagttccgcagcc

SEQ ID NO: 99 - DNA, 17 bp, Homo sapiens
gccaagttccgcagcct

SEQ ID NO: 100 - DNA, 17 bp, Homo sapiens
ccaagttccgcagcctg

SEQ ID NO: 101 - DNA, 17 bp, Homo sapiens
caagttccgcagcctgg

SEQ ID NO: 102 - DNA, 17 bp, Homo sapiens
aagttccgcagcctggc

SEQ ID NO: 103 - DNA, 17 bp, Homo sapiens
agttccgcagcctggca

SEQ ID NO: 104 - DNA, 17 bp, Homo sapiens
gttccgcagcctggcat

SEQ ID NO: 105 - DNA, 17 bp, Homo sapiens
ttccgcagcctggcatg

SEQ ID NO: 106 - DNA, 17 bp, Homo sapiens
tccgcagcctggcatgg

SEQ ID NO: 107 - DNA, 17 bp, Homo sapiens
ccgcagcctggcatggc

SEQ ID NO: 108 - DNA, 17 bp, Homo sapiens
cgcagcctggcatggct

SEQ ID NO: 109 - DNA, 17 bp, Homo sapiens
gcagcctggcatggctt

SEQ ID NO: 110 - DNA, 17 bp, Homo sapiens
cagcctggcatggcttc

SEQ ID NO: 111 - DNA, 17 bp, Homo sapiens
agcctggcatggcttct

SEQ ID NO: 112 - DNA, 17 bp, Homo sapiens
gcctggcatggcttctg

SEQ ID NO: 113 - DNA, 17 bp, Homo sapiens
cctggcatggcttctgg

SEQ ID NO: 114 - DNA, 17 bp, Homo sapiens
ctggcatggcttctggg

SEQ ID NO: 115 - DNA, 17 bp, Homo sapiens
tggcatggcttctgggg

SEQ ID NO: 116 - DNA, 17 bp, Homo sapiens
ggcatggcttctgggga

SEQ ID NO: 117 - DNA, 17 bp, Homo sapiens
gcatggcttctggggac

SEQ ID NO: 118 - DNA, 17 bp, Homo sapiens
catggcttctggggacc

SEQ ID NO: 119 - DNA, 17 bp, Homo sapiens
atggcttctggggacct

SEQ ID NO: 120 - DNA, 17 bp, Homo sapiens
tggcttctggggacctt

SEQ ID NO: 121 - DNA, 17 bp, Homo sapiens
ggcttctggggaccttt

SEQ ID NO: 122 - DNA, 17 bp, Homo sapiens
gcttctggggaccttta

SEQ ID NO: 123 - DNA, 17 bp, Homo sapiens
cttctggggacctttac

SEQ ID NO: 124 - DNA, 17 bp, Homo sapiens
ttctggggacctttacg

SEQ ID NO: 125 - DNA, 17 bp, Homo sapiens
tctggggacctttacga

SEQ ID NO: 126 - DNA, 17 bp, Homo sapiens
ctggggacctttacgag

SEQ ID NO: 127 - DNA, 17 bp, Homo sapiens
tggggacctttacgagg

SEQ ID NO: 128 - DNA, 17 bp, Homo sapiens
ggggacctttacgaggt

SEQ ID NO: 129 - DNA, 17 bp, Homo sapiens
gggacctttacgaggtt

SEQ ID NO: 130 - DNA, 17 bp, Homo sapiens
ggacctttacgaggttg

SEQ ID NO: 131 - DNA, 17 bp, Homo sapiens
gacctttacgaggttga

SEQ ID NO: 132 - DNA, 17 bp, Homo sapiens
acctttacgaggttgaa

SEQ ID NO: 133 - DNA, 17 bp, Homo sapiens
cctttacgaggttgaaa

SEQ ID NO: 134 - DNA, 17 bp, Homo sapiens
ctttacgaggttgaaag

SEQ ID NO: 135 - DNA, 17 bp, Homo sapiens
tttacgaggttgaaagg

SEQ ID NO: 136 - DNA, 17 bp, Homo sapiens
ttacgaggttgaaagga

SEQ ID NO: 137 - DNA, 17 bp, Homo sapiens
tacgaggttgaaaggat

SEQ ID NO: 138 - DNA, 17 bp, Homo sapiens
acgaggttgaaaggatt

SEQ ID NO: 139 - DNA, 17 bp, Homo sapiens
cgaggttgaaaggattg

SEQ ID NO: 140 - DNA, 17 bp, Homo sapiens
gaggttgaaaggattgt

SEQ ID NO: 141 - DNA, 17 bp, Homo sapiens
aggttgaaaggattgta

SEQ ID NO: 142 - DNA, 17 bp, Homo sapiens
ggttgaaaggattgtag

SEQ ID NO: 143 - DNA, 17 bp, Homo sapiens
gttgaaaggattgtaga

SEQ ID NO: 144 - DNA, 17 bp, Homo sapiens
ttgaaaggattgtagac

SEQ ID NO: 145 - DNA, 17 bp, Homo sapiens
tgaaaggattgtagaca

SEQ ID NO: 146 - DNA, 17 bp, Homo sapiens
gaaaggattgtagacaa

SEQ ID NO: 147 - DNA, 17 bp, Homo sapiens
aaaggattgtagacaag

SEQ ID NO: 148 - DNA, 17 bp, Homo sapiens
aaggattgtagacaaga

SEQ ID NO: 149 - DNA, 17 bp, Homo sapiens
aggattgtagacaagag

SEQ ID NO: 150 - DNA, 17 bp, Homo sapiens
ggattgtagacaagagg

SEQ ID NO: 151 - DNA, 17 bp, Homo sapiens
gattgtagacaagagga

SEQ ID NO: 152 - DNA, 17 bp, Homo sapiens
attgtagacaagaggaa

SEQ ID NO: 153 - DNA, 17 bp, Homo sapiens
ttgtagacaagaggaag

SEQ ID NO: 154 - DNA, 17 bp, Homo sapiens
tgtagacaagaggaaga

SEQ ID NO: 155 - DNA, 17 bp, Homo sapiens
gtagacaagaggaagaa

SEQ ID NO: 156 - DNA, 17 bp, Homo sapiens
tagacaagaggaagaac

SEQ ID NO: 157 - DNA, 17 bp, Homo sapiens
agacaagaggaagaaca

SEQ ID NO: 158 - DNA, 17 bp, Homo sapiens
gacaagaggaagaacaa

SEQ ID NO: 159 - DNA, 17 bp, Homo sapiens
acaagaggaagaacaag

SEQ ID NO: 160 - DNA, 17 bp, Homo sapiens
caagaggaagaacaaga

SEQ ID NO: 161 - DNA, 17 bp, Homo sapiens
aagaggaagaacaagaa

SEQ ID NO: 162 - DNA, 17 bp, Homo sapiens
agaggaagaacaagaaa

SEQ ID NO: 163 - DNA, 17 bp, Homo sapiens
gaggaagaacaagaaag

SEQ ID NO: 164 - DNA, 17 bp, Homo sapiens
aggaagaacaagaaagg

SEQ ID NO: 165 - DNA, 17 bp, Homo sapiens
ggaagaacaagaaagga

SEQ ID NO: 166 - DNA, 17 bp, Homo sapiens
gaagaacaagaaaggaa

SEQ ID NO: 167 - DNA, 17 bp, Homo sapiens
aagaacaagaaaggaaa

SEQ ID NO: 168 - DNA, 17 bp, Homo sapiens
agaacaagaaaggaaaa

SEQ ID NO: 169 - DNA, 17 bp, Homo sapiens
gaacaagaaaggaaaat

SEQ ID NO: 170 - DNA, 17 bp, Homo sapiens
aacaagaaaggaaaatg

SEQ ID NO: 171 - DNA, 17 bp, Homo sapiens
acaagaaaggaaaatgg

SEQ ID NO: 172 - DNA, 17 bp, Homo sapiens
caagaaaggaaaatggg

SEQ ID NO: 173 - DNA, 17 bp, Homo sapiens
aagaaaggaaaatggga

SEQ ID NO: 174 - DNA, 17 bp, Homo sapiens
agaaaggaaaatgggag

SEQ ID NO: 175 - DNA, 17 bp, Homo sapiens
gaaaggaaaatgggagt

SEQ ID NO: 176 - DNA, 17 bp, Homo sapiens
aaaggaaaatgggagta

SEQ ID NO: 177 - DNA, 17 bp, Homo sapiens
aaggaaaatgggagtat

SEQ ID NO: 178 - DNA, 17 bp, Homo sapiens
aggaaaatgggagtatc

SEQ ID NO: 179 - DNA, 17 bp, Homo sapiens
ggaaaatgggagtatct

SEQ ID NO: 180 - DNA, 17 bp, Homo sapiens
gaaaatgggagtatctt

SEQ ID NO: 181 - DNA, 17 bp, Homo sapiens
aaaatgggagtatctta

SEQ ID NO: 182 - DNA, 17 bp, Homo sapiens
aaatgggagtatcttat

SEQ ID NO: 183 - DNA, 17 bp, Homo sapiens
aatgggagtatcttatc

SEQ ID NO: 184 - DNA, 17 bp, Homo sapiens
atgggagtatcttatcc

SEQ ID NO: 185 - DNA, 17 bp, Homo sapiens
tgggagtatcttatccg

SEQ ID NO: 186 - DNA, 17 bp, Homo sapiens
gggagtatcttatccga

SEQ ID NO: 187 - DNA, 17 bp, Homo sapiens
ggagtatcttatccgat

SEQ ID NO: 188 - DNA, 17 bp, Homo sapiens
gagtatcttatccgatg

SEQ ID NO: 189 - DNA, 17 bp, Homo sapiens
agtatcttatccgatgg

SEQ ID NO: 190 - DNA, 17 bp, Homo sapiens
gtatcttatccgatgga

SEQ ID NO: 191 - DNA, 17 bp, Homo sapiens
tatcttatccgatggaa

SEQ ID NO: 192 - DNA, 17 bp, Homo sapiens
atcttatccgatggaaa

SEQ ID NO: 193 - DNA, 17 bp, Homo sapiens
tcttatccgatggaaag

SEQ ID NO: 194 - DNA, 17 bp, Homo sapiens
cttatccgatggaaagg

SEQ ID NO: 195 - DNA, 17 bp, Homo sapiens
ttatccgatggaaaggc

SEQ ID NO: 196 - DNA, 17 bp, Homo sapiens
tatccgatggaaaggct

SEQ ID NO: 197 - DNA, 17 bp, Homo sapiens
atccgatggaaaggcta

SEQ ID NO: 198 - DNA, 17 bp, Homo sapiens
tccgatggaaaggctac

SEQ ID NO: 199 - DNA, 17 bp, Homo sapiens
ccgatggaaaggctacg

SEQ ID NO: 200 - DNA, 17 bp, Homo sapiens
cgatggaaaggctacgg

SEQ ID NO: 201 - DNA, 17 bp, Homo sapiens
gatggaaaggctacggg

SEQ ID NO: 202 - DNA, 17 bp, Homo sapiens
atggaaaggctacggga

SEQ ID NO: 203 - DNA, 17 bp, Homo sapiens
tggaaaggctacgggag

SEQ ID NO: 204 - DNA, 17 bp, Homo sapiens
ggaaaggctacgggagc

SEQ ID NO: 205 - DNA, 17 bp, Homo sapiens
gaaaggctacgggagca

SEQ ID NO: 206 - DNA, 17 bp, Homo sapiens
aaaggctacgggagcac

SEQ ID NO: 207 - DNA, 17 bp, Homo sapiens
aaggctacgggagcacc

SEQ ID NO: 208 - DNA, 17 bp, Homo sapiens
aggctacgggagcaccg

SEQ ID NO: 209 - DNA, 17 bp, Homo sapiens
ggctacgggagcaccga

SEQ ID NO: 210 - DNA, 17 bp, Homo sapiens
gctacgggagcaccgag

SEQ ID NO: 211 - DNA, 17 bp, Homo sapiens
ctacgggagcaccgagg

SEQ ID NO: 212 - DNA, 17 bp, Homo sapiens
tacgggagcaccgagga

SEQ ID NO: 213 - DNA, 17 bp, Homo sapiens
acgggagcaccgaggac

SEQ ID NO: 214 - DNA, 17 bp, Homo sapiens
cgggagcaccgaggaca

SEQ ID NO: 215 - DNA, 17 bp, Homo sapiens
gggagcaccgaggacac

SEQ ID NO: 216 - DNA, 17 bp, Homo sapiens
ggagcaccgaggacacg

SEQ ID NO: 217 - DNA, 17 bp, Homo sapiens
gagcaccgaggacacgt

SEQ ID NO: 218 - DNA, 17 bp, Homo sapiens
agcaccgaggacacgtg

SEQ ID NO: 219 - DNA, 17 bp, Homo sapiens
gcaccgaggacacgtgg

SEQ ID NO: 220 - DNA, 17 bp, Homo sapiens
caccgaggacacgtggg

SEQ ID NO: 221 - DNA, 17 bp, Homo sapiens
accgaggacacgtggga

SEQ ID NO: 222 - DNA, 17 bp, Homo sapiens
ccgaggacacgtgggag

SEQ ID NO: 223 - DNA, 17 bp, Homo sapiens
cgaggacacgtgggagc

SEQ ID NO: 224 - DNA, 17 bp, Homo sapiens
gaggacacgtgggagcc

SEQ ID NO: 225 - DNA, 17 bp, Homo sapiens
aggacacgtgggagccg

SEQ ID NO: 226 - DNA, 17 bp, Homo sapiens
ggacacgtgggagccgg

SEQ ID NO: 227 - DNA, 17 bp, Homo sapiens
gacacgtgggagccgga

SEQ ID NO: 228 - DNA, 17 bp, Homo sapiens
acacgtgggagccggag

SEQ ID NO: 229 - DNA, 17 bp, Homo sapiens
cacgtgggagccggagc

SEQ ID NO: 230 - DNA, 17 bp, Homo sapiens
acgtgggagccggagca

SEQ ID NO: 231 - DNA, 17 bp, Homo sapiens
cgtgggagccggagcac

SEQ ID NO: 232 - DNA, 17 bp, Homo sapiens
gtgggagccggagcacc

SEQ ID NO: 233 - DNA, 17 bp, Homo sapiens
tgggagccggagcacca

SEQ ID NO: 234 - DNA, 17 bp, Homo sapiens
gggagccggagcaccac

SEQ ID NO: 235 - DNA, 17 bp, Homo sapiens
ggagccggagcaccacc

SEQ ID NO: 236 - DNA, 17 bp, Homo sapiens
gagccggagcaccacct

SEQ ID NO: 237 - DNA, 17 bp, Homo sapiens
agccggagcaccacctc

SEQ ID NO: 238 - DNA, 17 bp, Homo sapiens
gccggagcaccacctct

SEQ ID NO: 239 - DNA, 17 bp, Homo sapiens
ccggagcaccacctctt

SEQ ID NO: 240 - DNA, 17 bp, Homo sapiens
cggagcaccacctcttg

SEQ ID NO: 241 - DNA, 17 bp, Homo sapiens
ggagcaccacctcttgc

SEQ ID NO: 242 - DNA, 17 bp, Homo sapiens
gagcaccacctcttgca

SEQ ID NO: 243 - DNA, 17 bp, Homo sapiens
agcaccacctcttgcac

SEQ ID NO: 244 - DNA, 17 bp, Homo sapiens
gcaccacctcttgcact

SEQ ID NO: 245 - DNA, 17 bp, Homo sapiens
caccacctcttgcactg

SEQ ID NO: 246 - DNA, 17 bp, Homo sapiens
accacctcttgcactgt

SEQ ID NO: 247 - DNA, 17 bp, Homo sapiens
ccacctcttgcactgtg

SEQ ID NO: 248 - DNA, 17 bp, Homo sapiens
cacctcttgcactgtga

SEQ ID NO: 249 - DNA, 17 bp, Homo sapiens
acctcttgcactgtgag

SEQ ID NO: 250 - DNA, 17 bp, Homo sapiens
cctcttgcactgtgagg

SEQ ID NO: 251 - DNA, 17 bp, Homo sapiens
ctcttgcactgtgagga

SEQ ID NO: 252 - DNA, 17 bp, Homo sapiens
tcttgcactgtgaggag

SEQ ID NO: 253 - DNA, 17 bp, Homo sapiens
cttgcactgtgaggagt

SEQ ID NO: 254 - DNA, 17 bp, Homo sapiens
ttgcactgtgaggagtt

SEQ ID NO: 255 - DNA, 17 bp, Homo sapiens
tgcactgtgaggagttt

SEQ ID NO: 256 - DNA, 17 bp, Homo sapiens
gcactgtgaggagttta

SEQ ID NO: 257 - DNA, 17 bp, Homo sapiens
cactgtgaggagtttat

SEQ ID NO: 258 - DNA, 17 bp, Homo sapiens
actgtgaggagtttatt

SEQ ID NO: 259 - DNA, 17 bp, Homo sapiens
ctgtgaggagtttattg

SEQ ID NO: 260 - DNA, 17 bp, Homo sapiens
tgtgaggagtttattga

SEQ ID NO: 261 - DNA, 17 bp, Homo sapiens
gtgaggagtttattgat

SEQ ID NO: 262 - DNA, 17 bp, Homo sapiens
tgaggagtttattgatg

SEQ ID NO: 263 - DNA, 17 bp, Homo sapiens
gaggagtttattgatga

SEQ ID NO: 264 - DNA, 17 bp, Homo sapiens
aggagtttattgatgaa

SEQ ID NO: 265 - DNA, 17 bp, Homo sapiens
ggagtttattgatgaat

SEQ ID NO: 266 - DNA, 17 bp, Homo sapiens
gagtttattgatgaatt

SEQ ID NO: 267 - DNA, 17 bp, Homo sapiens
agtttattgatgaattc

SEQ ID NO: 268 - DNA, 17 bp, Homo sapiens
gtttattgatgaattca

SEQ ID NO: 269 - DNA, 17 bp, Homo sapiens
tttattgatgaattcaa

SEQ ID NO: 270 - DNA, 17 bp, Homo sapiens
ttattgatgaattcaat

SEQ ID NO: 271 - DNA, 17 bp, Homo sapiens
tattgatgaattcaatg

SEQ ID NO: 272 - DNA, 17 bp, Homo sapiens
attgatgaattcaatgg

SEQ ID NO: 273 - DNA, 17 bp, Homo sapiens
ttgatgaattcaatggg

SEQ ID NO: 274 - DNA, 17 bp, Homo sapiens
tgatgaattcaatgggt

SEQ ID NO: 275 - DNA, 17 bp, Homo sapiens
gatgaattcaatgggtt

SEQ ID NO: 276 - DNA, 17 bp, Homo sapiens
atgaattcaatgggttg

SEQ ID NO: 277 - DNA, 17 bp, Homo sapiens
tgaattcaatgggttgc

SEQ ID NO: 278 - DNA, 17 bp, Homo sapiens
gaattcaatgggttgca

SEQ ID NO: 279 - DNA, 17 bp, Homo sapiens
aattcaatgggttgcac

SEQ ID NO: 280 - DNA, 17 bp, Homo sapiens
attcaatgggttgcaca

SEQ ID NO: 281 - DNA, 17 bp, Homo sapiens
ttcaatgggttgcacat

SEQ ID NO: 282 - DNA, 17 bp, Homo sapiens
tcaatgggttgcacatg

SEQ ID NO: 283 - DNA, 17 bp, Homo sapiens
caatgggttgcacatgt

SEQ ID NO: 284 - DNA, 17 bp, Homo sapiens
aatgggttgcacatgtc

SEQ ID NO: 285 - DNA, 17 bp, Homo sapiens
atgggttgcacatgtcc

SEQ ID NO: 286 - DNA, 17 bp, Homo sapiens
tgggttgcacatgtcca

SEQ ID NO: 287 - DNA, 17 bp, Homo sapiens
gggttgcacatgtccaa

SEQ ID NO: 288 - DNA, 17 bp, Homo sapiens
ggttgcacatgtccaag

SEQ ID NO: 289 - DNA, 17 bp, Homo sapiens
gttgcacatgtccaagg

SEQ ID NO: 290 - DNA, 17 bp, Homo sapiens
ttgcacatgtccaagga

SEQ ID NO: 291 - DNA, 17 bp, Homo sapiens
tgcacatgtccaaggac

SEQ ID NO: 292 - DNA, 17 bp, Homo sapiens
gcacatgtccaaggaca

SEQ ID NO: 293 - DNA, 17 bp, Homo sapiens
cacatgtccaaggacaa

SEQ ID NO: 294 - DNA, 17 bp, Homo sapiens
acatgtccaaggacaag

SEQ ID NO: 295 - DNA, 17 bp, Homo sapiens
catgtccaaggacaaga

SEQ ID NO: 296 - DNA, 17 bp, Homo sapiens
atgtccaaggacaagag

SEQ ID NO: 297 - DNA, 17 bp, Homo sapiens
tgtccaaggacaagagg

SEQ ID NO: 298 - DNA, 17 bp, Homo sapiens
gtccaaggacaagagga

SEQ ID NO: 299 - DNA, 17 bp, Homo sapiens
tccaaggacaagaggat

SEQ ID NO: 300 - DNA, 17 bp, Homo sapiens
ccaaggacaagaggatc

SEQ ID NO: 301 - DNA, 17 bp, Homo sapiens
caaggacaagaggatca

SEQ ID NO: 302 - DNA, 17 bp, Homo sapiens
aaggacaagaggatcaa

SEQ ID NO: 303 - DNA, 17 bp, Homo sapiens
aggacaagaggatcaag

SEQ ID NO: 304 - DNA, 17 bp, Homo sapiens
ggacaagaggatcaagt

SEQ ID NO: 305 - DNA, 17 bp, Homo sapiens
gacaagaggatcaagtc

SEQ ID NO: 306 - DNA, 17 bp, Homo sapiens
acaagaggatcaagtca

SEQ ID NO: 307 - DNA, 17 bp, Homo sapiens
caagaggatcaagtcag

SEQ ID NO: 308 - DNA, 17 bp, Homo sapiens
aagaggatcaagtcagg

SEQ ID NO: 309 - DNA, 17 bp, Homo sapiens
agaggatcaagtcaggg

SEQ ID NO: 310 - DNA, 17 bp, Homo sapiens
gaggatcaagtcaggga

SEQ ID NO: 311 - DNA, 17 bp, Homo sapiens
aggatcaagtcagggaa

SEQ ID NO: 312 - DNA, 17 bp, Homo sapiens
ggatcaagtcagggaag

SEQ ID NO: 313 - DNA, 17 bp, Homo sapiens
gatcaagtcagggaagc

SEQ ID NO: 314 - DNA, 17 bp, Homo sapiens
atcaagtcagggaagca

SEQ ID NO: 315 - DNA, 17 bp, Homo sapiens
tcaagtcagggaagcag

SEQ ID NO: 316 - DNA, 17 bp, Homo sapiens
caagtcagggaagcagt

SEQ ID NO: 317 - DNA, 17 bp, Homo sapiens
aagtcagggaagcagtc

SEQ ID NO: 318 - DNA, 17 bp, Homo sapiens
agtcagggaagcagtcc

SEQ ID NO: 319 - DNA, 17 bp, Homo sapiens
gtcagggaagcagtcca

SEQ ID NO: 320 - DNA, 17 bp, Homo sapiens
tcagggaagcagtccag

SEQ ID NO: 321 - DNA, 17 bp, Homo sapiens
cagggaagcagtccagt

SEQ ID NO: 322 - DNA, 17 bp, Homo sapiens
agggaagcagtccagta

SEQ ID NO: 323 - DNA, 17 bp, Homo sapiens
gggaagcagtccagtac

SEQ ID NO: 324 - DNA, 17 bp, Homo sapiens
ggaagcagtccagtacc

SEQ ID NO: 325 - DNA, 17 bp, Homo sapiens
gaagcagtccagtacct

SEQ ID NO: 326 - DNA, 17 bp, Homo sapiens
aagcagtccagtacctc

SEQ ID NO: 327 - DNA, 17 bp, Homo sapiens
agcagtccagtacctcc

SEQ ID NO: 328 - DNA, 17 bp, Homo sapiens
gcagtccagtacctcca

SEQ ID NO: 329 - DNA, 17 bp, Homo sapiens
cagtccagtacctccaa

SEQ ID NO: 330 - DNA, 17 bp, Homo sapiens
agtccagtacctccaag

SEQ ID NO: 331 - DNA, 17 bp, Homo sapiens
gtccagtacctccaagc

SEQ ID NO: 332 - DNA, 17 bp, Homo sapiens
tccagtacctccaagct

SEQ ID NO: 333 - DNA, 17 bp, Homo sapiens
ccagtacctccaagctg

SEQ ID NO: 334 - DNA, 17 bp, Homo sapiens
cagtacctccaagctgc

SEQ ID NO: 335 - DNA, 17 bp, Homo sapiens
agtacctccaagctgct

SEQ ID NO: 336 - DNA, 17 bp, Homo sapiens
gtacctccaagctgctg

SEQ ID NO: 337 - DNA, 17 bp, Homo sapiens
tacctccaagctgctgc

SEQ ID NO: 338 - DNA, 17 bp, Homo sapiens
acctccaagctgctgcg

SEQ ID NO: 339 - DNA, 17 bp, Homo sapiens
cctccaagctgctgcgt

SEQ ID NO: 340 - DNA, 17 bp, Homo sapiens
ctccaagctgctgcgtg

SEQ ID NO: 341 - DNA, 17 bp, Homo sapiens
tccaagctgctgcgtga

SEQ ID NO: 342 - DNA, 17 bp, Homo sapiens
ccaagctgctgcgtgac

SEQ ID NO: 343 - DNA, 17 bp, Homo sapiens
caagctgctgcgtgaca

SEQ ID NO: 344 - DNA, 17 bp, Homo sapiens
aagctgctgcgtgacag

SEQ ID NO: 345 - DNA, 17 bp, Homo sapiens
agctgctgcgtgacagt

SEQ ID NO: 346 - DNA, 17 bp, Homo sapiens
gctgctgcgtgacagtc

SEQ ID NO: 347 - DNA, 17 bp, Homo sapiens
ctgctgcgtgacagtcg

SEQ ID NO: 348 - DNA, 17 bp, Homo sapiens
tgctgcgtgacagtcga

SEQ ID NO: 349 - DNA, 17 bp, Homo sapiens
gctgcgtgacagtcgag

SEQ ID NO: 350 - DNA, 17 bp, Homo sapiens
ctgcgtgacagtcgagg

SEQ ID NO: 351 - DNA, 17 bp, Homo sapiens
tgcgtgacagtcgaggc

SEQ ID NO: 352 - DNA, 17 bp, Homo sapiens
gcgtgacagtcgaggcc

SEQ ID NO: 353 - DNA, 17 bp, Homo sapiens
cgtgacagtcgaggccc

SEQ ID NO: 354 - DNA, 17 bp, Homo sapiens
gtgacagtcgaggcccg

SEQ ID NO: 355 - DNA, 17 bp, Homo sapiens
tgacagtcgaggcccgt

SEQ ID NO: 356 - DNA, 17 bp, Homo sapiens
gacagtcgaggcccgtc

SEQ ID NO: 357 - DNA, 17 bp, Homo sapiens
acagtcgaggcccgtcg

SEQ ID NO: 358 - DNA, 17 bp, Homo sapiens
cagtcgaggcccgtcgg

SEQ ID NO: 359 - DNA, 17 bp, Homo sapiens
agtcgaggcccgtcggt

SEQ ID NO: 360 - DNA, 17 bp, Homo sapiens
gtcgaggcccgtcggtt

SEQ ID NO: 361 - DNA, 17 bp, Homo sapiens
tcgaggcccgtcggttg

SEQ ID NO: 362 - DNA, 17 bp, Homo sapiens
cgaggcccgtcggttga

SEQ ID NO: 363 - DNA, 17 bp, Homo sapiens
gaggcccgtcggttgag

SEQ ID NO: 364 - DNA, 17 bp, Homo sapiens
aggcccgtcggttgaga

SEQ ID NO: 365 - DNA, 17 bp, Homo sapiens
ggcccgtcggttgagaa

SEQ ID NO: 366 - DNA, 17 bp, Homo sapiens
gcccgtcggttgagaaa

SEQ ID NO: 367 - DNA, 17 bp, Homo sapiens
cccgtcggttgagaaac

SEQ ID NO: 368 - DNA, 17 bp, Homo sapiens
ccgtcggttgagaaact

SEQ ID NO: 369 - DNA, 17 bp, Homo sapiens
cgtcggttgagaaactg

SEQ ID NO: 370 - DNA, 17 bp, Homo sapiens
gtcggttgagaaactgt

SEQ ID NO: 371 - DNA, 17 bp, Homo sapiens
tcggttgagaaactgtc

SEQ ID NO: 372 - DNA, 17 bp, Homo sapiens
cggttgagaaactgtcc

SEQ ID NO: 373 - DNA, 17 bp, Homo sapiens
ggttgagaaactgtccc

SEQ ID NO: 374 - DNA, 17 bp, Homo sapiens
gttgagaaactgtccca

SEQ ID NO: 375 - DNA, 17 bp, Homo sapiens
ttgagaaactgtcccac

SEQ ID NO: 376 - DNA, 17 bp, Homo sapiens
tgagaaactgtcccaca

SEQ ID NO: 377 - DNA, 17 bp, Homo sapiens
gagaaactgtcccacag

SEQ ID NO: 378 - DNA, 17 bp, Homo sapiens
agaaactgtcccacaga

SEQ ID NO: 379 - DNA, 17 bp, Homo sapiens
gaaactgtcccacagac

SEQ ID NO: 380 - DNA, 17 bp, Homo sapiens
aaactgtcccacagacc

SEQ ID NO: 381 - DNA, 17 bp, Homo sapiens
aactgtcccacagacct

SEQ ID NO: 382 - DNA, 17 bp, Homo sapiens
actgtcccacagacctt

SEQ ID NO: 383 - DNA, 17 bp, Homo sapiens
ctgtcccacagaccttc

SEQ ID NO: 384 - DNA, 17 bp, Homo sapiens
tgtcccacagaccttca

SEQ ID NO: 385 - DNA, 17 bp, Homo sapiens
gtcccacagaccttcag

SEQ ID NO: 386 - DNA, 17 bp, Homo sapiens
tcccacagaccttcaga

SEQ ID NO: 387 - DNA, 17 bp, Homo sapiens
cccacagaccttcagat

SEQ ID NO: 388 - DNA, 17 bp, Homo sapiens
ccacagaccttcagatc

SEQ ID NO: 389 - DNA, 17 bp, Homo sapiens
cacagaccttcagatcc

SEQ ID NO: 390 - DNA, 17 bp, Homo sapiens
acagaccttcagatcct

SEQ ID NO: 391 - DNA, 17 bp, Homo sapiens
cagaccttcagatcctg

SEQ ID NO: 392 - DNA, 17 bp, Homo sapiens
agaccttcagatcctgg

SEQ ID NO: 393 - DNA, 17 bp, Homo sapiens
gaccttcagatcctgga

SEQ ID NO: 394 - DNA, 17 bp, Homo sapiens
accttcagatcctggaa

SEQ ID NO: 395 - DNA, 17 bp, Homo sapiens
ccttcagatcctggaaa

SEQ ID NO: 396 - DNA, 17 bp, Homo sapiens
cttcagatcctggaaag

SEQ ID NO: 397 - DNA, 17 bp, Homo sapiens
ttcagatcctggaaaga

SEQ ID NO: 398 - DNA, 17 bp, Homo sapiens
tcagatcctggaaagag

SEQ ID NO: 399 - DNA, 17 bp, Homo sapiens
cagatcctggaaagagc

SEQ ID NO: 400 - DNA, 17 bp, Homo sapiens
agatcctggaaagagca

SEQ ID NO: 401 - DNA, 17 bp, Homo sapiens
gatcctggaaagagcaa

SEQ ID NO: 402 - DNA, 17 bp, Homo sapiens
atcctggaaagagcaag

SEQ ID NO: 403 - DNA, 17 bp, Homo sapiens
tcctggaaagagcaagg

SEQ ID NO: 404 - DNA, 17 bp, Homo sapiens
cctggaaagagcaaggg

SEQ ID NO: 405 - DNA, 17 bp, Homo sapiens
ctggaaagagcaagggg

SEQ ID NO: 406 - DNA, 17 bp, Homo sapiens
tggaaagagcaagggga

SEQ ID NO: 407 - DNA, 17 bp, Homo sapiens
ggaaagagcaaggggac

SEQ ID NO: 408 - DNA, 17 bp, Homo sapiens
gaaagagcaaggggacc

SEQ ID NO: 409 - DNA, 17 bp, Homo sapiens
aaagagcaaggggacct

SEQ ID NO: 410 - DNA, 17 bp, Homo sapiens
aagagcaaggggacctc

SEQ ID NO: 411 - DNA, 17 bp, Homo sapiens
agagcaaggggacctcc

SEQ ID NO: 412 - DNA, 17 bp, Homo sapiens
gagcaaggggacctccc

SEQ ID NO: 413 - DNA, 17 bp, Homo sapiens
agcaaggggacctccca

SEQ ID NO: 414 - DNA, 17 bp, Homo sapiens
gcaaggggacctcccat

SEQ ID NO: 415 - DNA, 17 bp, Homo sapiens
caaggggacctcccata

SEQ ID NO: 416 - DNA, 17 bp, Homo sapiens
aaggggacctcccataa

SEQ ID NO: 417 - DNA, 17 bp, Homo sapiens
aggggacctcccataaa

SEQ ID NO: 418 - DNA, 17 bp, Homo sapiens
ggggacctcccataaac

SEQ ID NO: 419 - DNA, 17 bp, Homo sapiens
gggacctcccataaacg

SEQ ID NO: 420 - DNA, 17 bp, Homo sapiens
ggacctcccataaacgg

SEQ ID NO: 421 - DNA, 17 bp, Homo sapiens
gacctcccataaacgga

SEQ ID NO: 422 - DNA, 17 bp, Homo sapiens
acctcccataaacggaa

SEQ ID NO: 423 - DNA, 17 bp, Homo sapiens
cctcccataaacggaag

SEQ ID NO: 424 - DNA, 17 bp, Homo sapiens
ctcccataaacggaagc

SEQ ID NO: 425 - DNA, 17 bp, Homo sapiens
tcccataaacggaagcg

SEQ ID NO: 426 - DNA, 17 bp, Homo sapiens
cccataaacggaagcga

SEQ ID NO: 427 - DNA, 17 bp, Homo sapiens
ccataaacggaagcgaa

SEQ ID NO: 428 - DNA, 17 bp, Homo sapiens
cataaacggaagcgaat

SEQ ID NO: 429 - DNA, 17 bp, Homo sapiens
ataaacggaagcgaatt

SEQ ID NO: 430 - DNA, 17 bp, Homo sapiens
taaacggaagcgaatta

SEQ ID NO: 431 - DNA, 17 bp, Homo sapiens
aaacggaagcgaattaa

SEQ ID NO: 432 - DNA, 17 bp, Homo sapiens
aacggaagcgaattaac

SEQ ID NO: 433 - DNA, 17 bp, Homo sapiens
acggaagcgaattaacc

SEQ ID NO: 434 - DNA, 17 bp, Homo sapiens
cggaagcgaattaaccc

SEQ ID NO: 435 - DNA, 17 bp, Homo sapiens
ggaagcgaattaaccct

SEQ ID NO: 436 - DNA, 17 bp, Homo sapiens
gaagcgaattaaccctc

SEQ ID NO: 437 - DNA, 17 bp, Homo sapiens
aagcgaattaaccctcc

SEQ ID NO: 438 - DNA, 17 bp, Homo sapiens
agcgaattaaccctccc

SEQ ID NO: 439 - DNA, 17 bp, Homo sapiens
gcgaattaaccctcccc

SEQ ID NO: 440 - DNA, 17 bp, Homo sapiens
cgaattaaccctcccct

SEQ ID NO: 441 - DNA, 17 bp, Homo sapiens
gaattaaccctcccctg

SEQ ID NO: 442 - DNA, 17 bp, Homo sapiens
aattaaccctcccctgg

SEQ ID NO: 443 - DNA, 17 bp, Homo sapiens
attaaccctcccctggc

SEQ ID NO: 444 - DNA, 17 bp, Homo sapiens
ttaaccctcccctggcc

SEQ ID NO: 445 - DNA, 17 bp, Homo sapiens
taaccctcccctggcca

SEQ ID NO: 446 - DNA, 17 bp, Homo sapiens
aaccctcccctggccaa

SEQ ID NO: 447 - DNA, 17 bp, Homo sapiens
accctcccctggccaag

SEQ ID NO: 448 - DNA, 17 bp, Homo sapiens
ccctcccctggccaagc

SEQ ID NO: 449 - DNA, 17 bp, Homo sapiens
cctcccctggccaagcc

SEQ ID NO: 450 - DNA, 17 bp, Homo sapiens
ctcccctggccaagcca

SEQ ID NO: 451 - DNA, 17 bp, Homo sapiens
tcccctggccaagccaa

SEQ ID NO: 452 - DNA, 17 bp, Homo sapiens
cccctggccaagccaaa

SEQ ID NO: 453 - DNA, 17 bp, Homo sapiens
ccctggccaagccaaaa

SEQ ID NO: 454 - DNA, 17 bp, Homo sapiens
cctggccaagccaaaaa

SEQ ID NO: 455 - DNA, 17 bp, Homo sapiens
ctggccaagccaaaaaa

SEQ ID NO: 456 - DNA, 17 bp, Homo sapiens
tggccaagccaaaaaaa

SEQ ID NO: 457 - DNA, 17 bp, Homo sapiens
ggccaagccaaaaaaag

SEQ ID NO: 458 - DNA, 17 bp, Homo sapiens
gccaagccaaaaaaagg

SEQ ID NO: 459 - DNA, 17 bp, Homo sapiens
ccaagccaaaaaaaggg

SEQ ID NO: 460 - DNA, 17 bp, Homo sapiens
caagccaaaaaaagggt

SEQ ID NO: 461 - DNA, 17 bp, Homo sapiens
aagccaaaaaaagggta

SEQ ID NO: 462 - DNA, 17 bp, Homo sapiens
agccaaaaaaagggtat

SEQ ID NO: 463 - DNA, 17 bp, Homo sapiens
gccaaaaaaagggtatt

SEQ ID NO: 464 - DNA, 17 bp, Homo sapiens
ccaaaaaaagggtattc

SEQ ID NO: 465 - DNA, 17 bp, Homo sapiens
caaaaaaagggtattca

SEQ ID NO: 466 - DNA, 17 bp, Homo sapiens
aaaaaaagggtattcag

SEQ ID NO: 467 - DNA, 17 bp, Homo sapiens
aaaaaagggtattcagg

SEQ ID NO: 468 - DNA, 17 bp, Homo sapiens
aaaaagggtattcaggc

SEQ ID NO: 469 - DNA, 17 bp, Homo sapiens
aaaagggtattcaggca

SEQ ID NO: 470 - DNA, 17 bp, Homo sapiens
aaagggtattcaggcaa

SEQ ID NO: 471 - DNA, 17 bp, Homo sapiens
aagggtattcaggcaag

SEQ ID NO: 472 - DNA, 17 bp, Homo sapiens
agggtattcaggcaagc

SEQ ID NO: 473 - DNA, 17 bp, Homo sapiens
gggtattcaggcaagcc

SEQ ID NO: 474 - DNA, 17 bp, Homo sapiens
ggtattcaggcaagccc

SEQ ID NO: 475 - DNA, 17 bp, Homo sapiens
gtattcaggcaagccct

SEQ ID NO: 476 - DNA, 17 bp, Homo sapiens
tattcaggcaagccctc

SEQ ID NO: 477 - DNA, 17 bp, Homo sapiens
attcaggcaagccctct

SEQ ID NO: 478 - DNA, 17 bp, Homo sapiens
ttcaggcaagccctctt

SEQ ID NO: 479 - DNA, 17 bp, Homo sapiens
tcaggcaagccctcttc

SEQ ID NO: 480 - DNA, 17 bp, Homo sapiens
caggcaagccctcttca

SEQ ID NO: 481 - DNA, 17 bp, Homo sapiens
aggcaagccctcttcag

SEQ ID NO: 482 - DNA, 17 bp, Homo sapiens
ggcaagccctcttcagg

SEQ ID NO: 483 - DNA, 17 bp, Homo sapiens
gcaagccctcttcagga

SEQ ID NO: 484 - DNA, 17 bp, Homo sapiens
caagccctcttcaggag

SEQ ID NO: 485 - DNA, 17 bp, Homo sapiens
aagccctcttcaggagg

SEQ ID NO: 486 - DNA, 17 bp, Homo sapiens
agccctcttcaggaggt

SEQ ID NO: 487 - DNA, 17 bp, Homo sapiens
gccctcttcaggaggtg

SEQ ID NO: 488 - DNA, 17 bp, Homo sapiens
ccctcttcaggaggtga

SEQ ID NO: 489 - DNA, 17 bp, Homo sapiens
cctcttcaggaggtgac

SEQ ID NO: 490 - DNA, 17 bp, Homo sapiens
ctcttcaggaggtgaca

SEQ ID NO: 491 - DNA, 17 bp, Homo sapiens
tcttcaggaggtgacag

SEQ ID NO: 492 - DNA, 17 bp, Homo sapiens
cttcaggaggtgacagg

SEQ ID NO: 493 - DNA, 17 bp, Homo sapiens
ttcaggaggtgacaggg

SEQ ID NO: 494 - DNA, 17 bp, Homo sapiens
tcaggaggtgacagggc

SEQ ID NO: 495 - DNA, 17 bp, Homo sapiens
caggaggtgacagggcc

SEQ ID NO: 496 - DNA, 17 bp, Homo sapiens
aggaggtgacagggcca

SEQ ID NO: 497 - DNA, 17 bp, Homo sapiens
ggaggtgacagggccac

SEQ ID NO: 498 - DNA, 17 bp, Homo sapiens
gaggtgacagggccacc

SEQ ID NO: 499 - DNA, 17 bp, Homo sapiens
aggtgacagggccacca

SEQ ID NO: 500 - DNA, 17 bp, Homo sapiens
ggtgacagggccaccaa

SEQ ID NO: 501 - DNA, 17 bp, Homo sapiens
gtgacagggccaccaag

SEQ ID NO: 502 - DNA, 17 bp, Homo sapiens
tgacagggccaccaaga

SEQ ID NO: 503 - DNA, 17 bp, Homo sapiens
gacagggccaccaagac

SEQ ID NO: 504 - DNA, 17 bp, Homo sapiens
acagggccaccaagacg

SEQ ID NO: 505 - DNA, 17 bp, Homo sapiens
cagggccaccaagacgg

SEQ ID NO: 506 - DNA, 17 bp, Homo sapiens
agggccaccaagacggt

SEQ ID NO: 507 - DNA, 17 bp, Homo sapiens
gggccaccaagacggtg

SEQ ID NO: 508 - DNA, 17 bp, Homo sapiens
ggccaccaagacggtgt

SEQ ID NO: 509 - DNA, 17 bp, Homo sapiens
gccaccaagacggtgtc

SEQ ID NO: 510 - DNA, 17 bp, Homo sapiens
ccaccaagacggtgtct

SEQ ID NO: 511 - DNA, 17 bp, Homo sapiens
caccaagacggtgtctt

SEQ ID NO: 512 - DNA, 17 bp, Homo sapiens
accaagacggtgtctta

SEQ ID NO: 513 - DNA, 17 bp, Homo sapiens
ccaagacggtgtcttac

SEQ ID NO: 514 - DNA, 17 bp, Homo sapiens
caagacggtgtcttaca

SEQ ID NO: 515 - DNA, 17 bp, Homo sapiens
aagacggtgtcttacag

SEQ ID NO: 516 - DNA, 17 bp, Homo sapiens
agacggtgtcttacagg

SEQ ID NO: 517 - DNA, 17 bp, Homo sapiens
gacggtgtcttacagga

SEQ ID NO: 518 - DNA, 17 bp, Homo sapiens
acggtgtcttacaggac

SEQ ID NO: 519 - DNA, 17 bp, Homo sapiens
cggtgtcttacaggact

SEQ ID NO: 520 - DNA, 17 bp, Homo sapiens
ggtgtcttacaggacta

SEQ ID NO: 521 - DNA, 17 bp, Homo sapiens
gtgtcttacaggactac

SEQ ID NO: 522 - DNA, 17 bp, Homo sapiens
tgtcttacaggactacc

SEQ ID NO: 523 - DNA, 17 bp, Homo sapiens
gtcttacaggactaccc

SEQ ID NO: 524 - DNA, 17 bp, Homo sapiens
tcttacaggactacccc

SEQ ID NO: 525 - DNA, 17 bp, Homo sapiens
cttacaggactaccccc

SEQ ID NO: 526 - DNA, 17 bp, Homo sapiens
ttacaggactaccccca

SEQ ID NO: 527 - DNA, 17 bp, Homo sapiens
tacaggactacccccag

SEQ ID NO: 528 - DNA, 17 bp, Homo sapiens
acaggactacccccagt

SEQ ID NO: 529 - DNA, 17 bp, Homo sapiens
caggactacccccagtg

SEQ ID NO: 530 - DNA, 17 bp, Homo sapiens
aggactacccccagtgg

SEQ ID NO: 531 - DNA, 17 bp, Homo sapiens
ggactacccccagtggt

SEQ ID NO: 532 - DNA, 17 bp, Homo sapiens
gactacccccagtggtt

SEQ ID NO: 533 - DNA, 17 bp, Homo sapiens
actacccccagtggttt

SEQ ID NO: 534 - DNA, 17 bp, Homo sapiens
ctacccccagtggtttg

SEQ ID NO: 535 - DNA, 17 bp, Homo sapiens
tacccccagtggtttgc

SEQ ID NO: 536 - DNA, 17 bp, Homo sapiens
acccccagtggtttgca

SEQ ID NO: 537 - DNA, 17 bp, Homo sapiens
cccccagtggtttgcaa

SEQ ID NO: 538 - DNA, 17 bp, Homo sapiens
ccccagtggtttgcaaa

SEQ ID NO: 539 - DNA, 17 bp, Homo sapiens
cccagtggtttgcaaat

SEQ ID NO: 540 - DNA, 17 bp, Homo sapiens
ccagtggtttgcaaata

SEQ ID NO: 541 - DNA, 17 bp, Homo sapiens
cagtggtttgcaaataa

SEQ ID NO: 542 - DNA, 17 bp, Homo sapiens
agtggtttgcaaataat

SEQ ID NO: 543 - DNA, 17 bp, Homo sapiens
gtggtttgcaaataatg

SEQ ID NO: 544 - DNA, 17 bp, Homo sapiens
tggtttgcaaataatgc

SEQ ID NO: 545 - DNA, 17 bp, Homo sapiens
ggtttgcaaataatgcc

SEQ ID NO: 546 - DNA, 17 bp, Homo sapiens
gtttgcaaataatgccc

SEQ ID NO: 547 - DNA, 17 bp, Homo sapiens
tttgcaaataatgcccc

SEQ ID NO: 548 - DNA, 17 bp, Homo sapiens
ttgcaaataatgcccct

SEQ ID NO: 549 - DNA, 17 bp, Homo sapiens
tgcaaataatgcccctg

SEQ ID NO: 550 - DNA, 17 bp, Homo sapiens
gcaaataatgcccctga

SEQ ID NO: 551 - DNA, 17 bp, Homo sapiens
caaataatgcccctgaa

SEQ ID NO: 552 - DNA, 17 bp, Homo sapiens
aaataatgcccctgaaa

SEQ ID NO: 553 - DNA, 17 bp, Homo sapiens
aataatgcccctgaaaa

SEQ ID NO: 554 - DNA, 17 bp, Homo sapiens
ataatgcccctgaaaaa

SEQ ID NO: 555 - DNA, 17 bp, Homo sapiens
taatgcccctgaaaaag

SEQ ID NO: 556 - DNA, 17 bp, Homo sapiens
aatgcccctgaaaaagt

SEQ ID NO: 557 - DNA, 17 bp, Homo sapiens
atgcccctgaaaaagtc

SEQ ID NO: 558 - DNA, 17 bp, Homo sapiens
tgcccctgaaaaagtct

SEQ ID NO: 559 - DNA, 17 bp, Homo sapiens
gcccctgaaaaagtctc

SEQ ID NO: 560 - DNA, 17 bp, Homo sapiens
cccctgaaaaagtctca

SEQ ID NO: 561 - DNA, 17 bp, Homo sapiens
ccctgaaaaagtctcag

SEQ ID NO: 562 - DNA, 17 bp, Homo sapiens
cctgaaaaagtctcaga

SEQ ID NO: 563 - DNA, 17 bp, Homo sapiens
ctgaaaaagtctcagaa

SEQ ID NO: 564 - DNA, 17 bp, Homo sapiens
tgaaaaagtctcagaac

SEQ ID NO: 565 - DNA, 17 bp, Homo sapiens
gaaaaagtctcagaacg

SEQ ID NO: 566 - DNA, 17 bp, Homo sapiens
aaaaagtctcagaacgg

SEQ ID NO: 567 - DNA, 17 bp, Homo sapiens
aaaagtctcagaacggg

SEQ ID NO: 568 - DNA, 17 bp, Homo sapiens
aaagtctcagaacggga

SEQ ID NO: 569 - DNA, 17 bp, Homo sapiens
aagtctcagaacgggat

SEQ ID NO: 570 - DNA, 17 bp, Homo sapiens
agtctcagaacgggatg

SEQ ID NO: 571 - DNA, 17 bp, Homo sapiens
gtctcagaacgggatgg

SEQ ID NO: 572 - DNA, 17 bp, Homo sapiens
tctcagaacgggatgga

SEQ ID NO: 573 - DNA, 17 bp, Homo sapiens
ctcagaacgggatggaa

SEQ ID NO: 574 - DNA, 17 bp, Homo sapiens
tcagaacgggatggaaa

SEQ ID NO: 575 - DNA, 17 bp, Homo sapiens
cagaacgggatggaaaa

SEQ ID NO: 576 - DNA, 17 bp, Homo sapiens
agaacgggatggaaaat

SEQ ID NO: 577 - DNA, 17 bp, Homo sapiens
gaacgggatggaaaatg

SEQ ID NO: 578 - DNA, 17 bp, Homo sapiens
aacgggatggaaaatgg

SEQ ID NO: 579 - DNA, 17 bp, Homo sapiens
acgggatggaaaatggg

SEQ ID NO: 580 - DNA, 17 bp, Homo sapiens
cgggatggaaaatgggg

SEQ ID NO: 581 - DNA, 17 bp, Homo sapiens
gggatggaaaatgggga

SEQ ID NO: 582 - DNA, 17 bp, Homo sapiens
ggatggaaaatggggac

SEQ ID NO: 583 - DNA, 17 bp, Homo sapiens
gatggaaaatggggacg

SEQ ID NO: 584 - DNA, 17 bp, Homo sapiens
atggaaaatggggacgc

SEQ ID NO: 585 - DNA, 17 bp, Homo sapiens
tggaaaatggggacgcc

SEQ ID NO: 586 - DNA, 17 bp, Homo sapiens
ggaaaatggggacgccg

SEQ ID NO: 587 - DNA, 17 bp, Homo sapiens
gaaaatggggacgccgg

SEQ ID NO: 588 - DNA, 17 bp, Homo sapiens
aaaatggggacgccggc

SEQ ID NO: 589 - DNA, 17 bp, Homo sapiens
aaatggggacgccggct

SEQ ID NO: 590 - DNA, 17 bp, Homo sapiens
aatggggacgccggctc

SEQ ID NO: 591 - DNA, 17 bp, Homo sapiens
atggggacgccggctct

SEQ ID NO: 592 - DNA, 17 bp, Homo sapiens
tggggacgccggctctg

SEQ ID NO: 593 - DNA, 17 bp, Homo sapiens
ggggacgccggctctga

SEQ ID NO: 594 - DNA, 17 bp, Homo sapiens
gggacgccggctctgag

SEQ ID NO: 595 - DNA, 17 bp, Homo sapiens
ggacgccggctctgaga

SEQ ID NO: 596 - DNA, 17 bp, Homo sapiens
gacgccggctctgagaa

SEQ ID NO: 597 - DNA, 17 bp, Homo sapiens
acgccggctctgagaag

SEQ ID NO: 598 - DNA, 17 bp, Homo sapiens
cgccggctctgagaagg

SEQ ID NO: 599 - DNA, 17 bp, Homo sapiens
gccggctctgagaagga

SEQ ID NO: 600 - DNA, 17 bp, Homo sapiens
ccggctctgagaaggat

SEQ ID NO: 601 - DNA, 17 bp, Homo sapiens
cggctctgagaaggatg

SEQ ID NO: 602 - DNA, 17 bp, Homo sapiens
ggctctgagaaggatga

SEQ ID NO: 603 - DNA, 17 bp, Homo sapiens
gctctgagaaggatgag

SEQ ID NO: 604 - DNA, 17 bp, Homo sapiens
ctctgagaaggatgaga

SEQ ID NO: 605 - DNA, 17 bp, Homo sapiens
tctgagaaggatgagag

SEQ ID NO: 606 - DNA, 17 bp, Homo sapiens
ctgagaaggatgagagg

SEQ ID NO: 607 - DNA, 17 bp, Homo sapiens
tgagaaggatgagaggc

SEQ ID NO: 608 - DNA, 17 bp, Homo sapiens
gagaaggatgagaggca

SEQ ID NO: 609 - DNA, 17 bp, Homo sapiens
agaaggatgagaggcac

SEQ ID NO: 610 - DNA, 17 bp, Homo sapiens
gaaggatgagaggcact

SEQ ID NO: 611 - DNA, 17 bp, Homo sapiens
aaggatgagaggcactt

SEQ ID NO: 612 - DNA, 17 bp, Homo sapiens
aggatgagaggcacttt

SEQ ID NO: 613 - DNA, 17 bp, Homo sapiens
ggatgagaggcactttg

SEQ ID NO: 614 - DNA, 17 bp, Homo sapiens
gatgagaggcactttgg

SEQ ID NO: 615 - DNA, 17 bp, Homo sapiens
atgagaggcactttgga

SEQ ID NO: 616 - DNA, 17 bp, Homo sapiens
tgagaggcactttggaa

SEQ ID NO: 617 - DNA, 17 bp, Homo sapiens
gagaggcactttggaaa

SEQ ID NO: 618 - DNA, 17 bp, Homo sapiens
agaggcactttggaaat

SEQ ID NO: 619 - DNA, 17 bp, Homo sapiens
gaggcactttggaaatg

SEQ ID NO: 620 - DNA, 17 bp, Homo sapiens
aggcactttggaaatgg

SEQ ID NO: 621 - DNA, 17 bp, Homo sapiens
ggcactttggaaatggg

SEQ ID NO: 622 - DNA, 17 bp, Homo sapiens
gcactttggaaatgggt

SEQ ID NO: 623 - DNA, 17 bp, Homo sapiens
cactttggaaatgggtc

SEQ ID NO: 624 - DNA, 17 bp, Homo sapiens
actttggaaatgggtcc

SEQ ID NO: 625 - DNA, 17 bp, Homo sapiens
ctttggaaatgggtccc

SEQ ID NO: 626 - DNA, 17 bp, Homo sapiens
tttggaaatgggtccca

SEQ ID NO: 627 - DNA, 17 bp, Homo sapiens
ttggaaatgggtcccat

SEQ ID NO: 628 - DNA, 17 bp, Homo sapiens
tggaaatgggtcccatc

SEQ ID NO: 629 - DNA, 17 bp, Homo sapiens
ggaaatgggtcccatca

SEQ ID NO: 630 - DNA, 17 bp, Homo sapiens
gaaatgggtcccatcag

SEQ ID NO: 631 - DNA, 17 bp, Homo sapiens
aaatgggtcccatcagc

SEQ ID NO: 632 - DNA, 17 bp, Homo sapiens
aatgggtcccatcagcc

SEQ ID NO: 633 - DNA, 17 bp, Homo sapiens
atgggtcccatcagcct

SEQ ID NO: 634 - DNA, 17 bp, Homo sapiens
tgggtcccatcagcctg

SEQ ID NO: 635 - DNA, 17 bp, Homo sapiens
gggtcccatcagcctgg

SEQ ID NO: 636 - DNA, 17 bp, Homo sapiens
ggtcccatcagcctggc

SEQ ID NO: 637 - DNA, 17 bp, Homo sapiens
gtcccatcagcctggct

SEQ ID NO: 638 - DNA, 17 bp, Homo sapiens
tcccatcagcctggctt

SEQ ID NO: 639 - DNA, 17 bp, Homo sapiens
cccatcagcctggcttg

SEQ ID NO: 640 - DNA, 17 bp, Homo sapiens
ccatcagcctggcttgg

SEQ ID NO: 641 - DNA, 17 bp, Homo sapiens
catcagcctggcttgga

SEQ ID NO: 642 - DNA, 17 bp, Homo sapiens
atcagcctggcttggat

SEQ ID NO: 643 - DNA, 17 bp, Homo sapiens
tcagcctggcttggatt

SEQ ID NO: 644 - DNA, 17 bp, Homo sapiens
cagcctggcttggattt

SEQ ID NO: 645 - DNA, 17 bp, Homo sapiens
agcctggcttggatttg

SEQ ID NO: 646 - DNA, 17 bp, Homo sapiens
gcctggcttggatttga

SEQ ID NO: 647 - DNA, 17 bp, Homo sapiens
cctggcttggatttgaa

SEQ ID NO: 648 - DNA, 17 bp, Homo sapiens
ctggcttggatttgaat

SEQ ID NO: 649 - DNA, 17 bp, Homo sapiens
tggcttggatttgaatg

SEQ ID NO: 650 - DNA, 17 bp, Homo sapiens
ggcttggatttgaatga

SEQ ID NO: 651 - DNA, 17 bp, Homo sapiens
gcttggatttgaatgat

SEQ ID NO: 652 - DNA, 17 bp, Homo sapiens
cttggatttgaatgatc

SEQ ID NO: 653 - DNA, 17 bp, Homo sapiens
ttggatttgaatgatca

SEQ ID NO: 654 - DNA, 17 bp, Homo sapiens
tggatttgaatgatcat

SEQ ID NO: 655 - DNA, 17 bp, Homo sapiens
ggatttgaatgatcatg

SEQ ID NO: 656 - DNA, 17 bp, Homo sapiens
gatttgaatgatcatgt

SEQ ID NO: 657 - DNA, 17 bp, Homo sapiens
atttgaatgatcatgtt

SEQ ID NO: 658 - DNA, 17 bp, Homo sapiens
tttgaatgatcatgttg

SEQ ID NO: 659 - DNA, 17 bp, Homo sapiens
ttgaatgatcatgttgg

SEQ ID NO: 660 - DNA, 17 bp, Homo sapiens
tgaatgatcatgttgga

SEQ ID NO: 661 - DNA, 17 bp, Homo sapiens
gaatgatcatgttggag

SEQ ID NO: 662 - DNA, 17 bp, Homo sapiens
aatgatcatgttggaga

SEQ ID NO: 663 - DNA, 17 bp, Homo sapiens
atgatcatgttggagag

SEQ ID NO: 664 - DNA, 17 bp, Homo sapiens
tgatcatgttggagagc

SEQ ID NO: 665 - DNA, 17 bp, Homo sapiens
gatcatgttggagagca

SEQ ID NO: 666 - DNA, 17 bp, Homo sapiens
atcatgttggagagcaa

SEQ ID NO: 667 - DNA, 17 bp, Homo sapiens
tcatgttggagagcaag

SEQ ID NO: 668 - DNA, 17 bp, Homo sapiens
catgttggagagcaaga

SEQ ID NO: 669 - DNA, 17 bp, Homo sapiens
atgttggagagcaagat

SEQ ID NO: 670 - DNA, 17 bp, Homo sapiens
tgttggagagcaagata

SEQ ID NO: 671 - DNA, 17 bp, Homo sapiens
gttggagagcaagatat

SEQ ID NO: 672 - DNA, 17 bp, Homo sapiens
ttggagagcaagatatg

SEQ ID NO: 673 - DNA, 17 bp, Homo sapiens
tggagagcaagatatgg

SEQ ID NO: 674 - DNA, 17 bp, Homo sapiens
ggagagcaagatatggg

SEQ ID NO: 675 - DNA, 17 bp, Homo sapiens
gagagcaagatatgggt

SEQ ID NO: 676 - DNA, 17 bp, Homo sapiens
agagcaagatatgggtg

SEQ ID NO: 677 - DNA, 17 bp, Homo sapiens
gagcaagatatgggtga

SEQ ID NO: 678 - DNA, 17 bp, Homo sapiens
agcaagatatgggtgaa

SEQ ID NO: 679 - DNA, 17 bp, Homo sapiens
gcaagatatgggtgaat

SEQ ID NO: 680 - DNA, 17 bp, Homo sapiens
caagatatgggtgaatg

SEQ ID NO: 681 - DNA, 17 bp, Homo sapiens
aagatatgggtgaatgt

SEQ ID NO: 682 - DNA, 17 bp, Homo sapiens
agatatgggtgaatgtg

SEQ ID NO: 683 - DNA, 17 bp, Homo sapiens
gatatgggtgaatgtga

SEQ ID NO: 684 - DNA, 17 bp, Homo sapiens
atatgggtgaatgtgac

SEQ ID NO: 685 - DNA, 17 bp, Homo sapiens
tatgggtgaatgtgacg

SEQ ID NO: 686 - DNA, 17 bp, Homo sapiens
atgggtgaatgtgacgt

SEQ ID NO: 687 - DNA, 17 bp, Homo sapiens
tgggtgaatgtgacgtg

SEQ ID NO: 688 - DNA, 17 bp, Homo sapiens
gggtgaatgtgacgtga

SEQ ID NO: 689 - DNA, 17 bp, Homo sapiens
ggtgaatgtgacgtgaa

SEQ ID NO: 690 - DNA, 17 bp, Homo sapiens
gtgaatgtgacgtgaat

SEQ ID NO: 691 - DNA, 17 bp, Homo sapiens
tgaatgtgacgtgaatc

SEQ ID NO: 692 - DNA, 17 bp, Homo sapiens
gaatgtgacgtgaatca

SEQ ID NO: 693 - DNA, 17 bp, Homo sapiens
aatgtgacgtgaatcac

SEQ ID NO: 694 - DNA, 17 bp, Homo sapiens
atgtgacgtgaatcacg

SEQ ID NO: 695 - DNA, 17 bp, Homo sapiens
tgtgacgtgaatcacgc

SEQ ID NO: 696 - DNA, 17 bp, Homo sapiens
gtgacgtgaatcacgct

SEQ ID NO: 697 - DNA, 17 bp, Homo sapiens
tgacgtgaatcacgcta

SEQ ID NO: 698 - DNA, 17 bp, Homo sapiens
gacgtgaatcacgctac

SEQ ID NO: 699 - DNA, 17 bp, Homo sapiens
acgtgaatcacgctaca

SEQ ID NO: 700 - DNA, 17 bp, Homo sapiens
cgtgaatcacgctacac

SEQ ID NO: 701 - DNA, 17 bp, Homo sapiens
gtgaatcacgctacact

SEQ ID NO: 702 - DNA, 17 bp, Homo sapiens
tgaatcacgctacactg

SEQ ID NO: 703 - DNA, 17 bp, Homo sapiens
gaatcacgctacactgg

SEQ ID NO: 704 - DNA, 17 bp, Homo sapiens
aatcacgctacactggc

SEQ ID NO: 705 - DNA, 17 bp, Homo sapiens
atcacgctacactggcg

SEQ ID NO: 706 - DNA, 17 bp, Homo sapiens
tcacgctacactggcgg

SEQ ID NO: 707 - DNA, 17 bp, Homo sapiens
cacgctacactggcgga

SEQ ID NO: 708 - DNA, 17 bp, Homo sapiens
acgctacactggcggag

SEQ ID NO: 709 - DNA, 17 bp, Homo sapiens
cgctacactggcggaga

SEQ ID NO: 710 - DNA, 17 bp, Homo sapiens
gctacactggcggagaa

SEQ ID NO: 711 - DNA, 17 bp, Homo sapiens
ctacactggcggagaac

SEQ ID NO: 712 - DNA, 17 bp, Homo sapiens
tacactggcggagaacg

SEQ ID NO: 713 - DNA, 17 bp, Homo sapiens
acactggcggagaacgg

SEQ ID NO: 714 - DNA, 17 bp, Homo sapiens
cactggcggagaacggg

SEQ ID NO: 715 - DNA, 17 bp, Homo sapiens
actggcggagaacgggc

SEQ ID NO: 716 - DNA, 17 bp, Homo sapiens
ctggcggagaacgggct

SEQ ID NO: 717 - DNA, 17 bp, Homo sapiens
tggcggagaacgggctc

SEQ ID NO: 718 - DNA, 17 bp, Homo sapiens
ggcggagaacgggctcg

SEQ ID NO: 719 - DNA, 17 bp, Homo sapiens
gcggagaacgggctcgg

SEQ ID NO: 720 - DNA, 17 bp, Homo sapiens
cggagaacgggctcggt

SEQ ID NO: 721 - DNA, 17 bp, Homo sapiens
ggagaacgggctcggtg

SEQ ID NO: 722 - DNA, 17 bp, Homo sapiens
gagaacgggctcggtgg

SEQ ID NO: 723 - DNA, 17 bp, Homo sapiens
agaacgggctcggtggc

SEQ ID NO: 724 - DNA, 17 bp, Homo sapiens
gaacgggctcggtggct

SEQ ID NO: 725 - DNA, 17 bp, Homo sapiens
aacgggctcggtggctc

SEQ ID NO: 726 - DNA, 17 bp, Homo sapiens
acgggctcggtggctct

SEQ ID NO: 727 - DNA, 17 bp, Homo sapiens
cgggctcggtggctctg

SEQ ID NO: 728 - DNA, 17 bp, Homo sapiens
gggctcggtggctctgc

SEQ ID NO: 729 - DNA, 17 bp, Homo sapiens
ggctcggtggctctgct

SEQ ID NO: 730 - DNA, 17 bp, Homo sapiens
gctcggtggctctgctc

SEQ ID NO: 731 - DNA, 17 bp, Homo sapiens
ctcggtggctctgctct

SEQ ID NO: 732 - DNA, 17 bp, Homo sapiens
tcggtggctctgctctg

SEQ ID NO: 733 - DNA, 17 bp, Homo sapiens
cggtggctctgctctga

SEQ ID NO: 734 - DNA, 17 bp, Homo sapiens
ggtggctctgctctgac

SEQ ID NO: 735 - DNA, 17 bp, Homo sapiens
gtggctctgctctgacc

SEQ ID NO: 736 - DNA, 17 bp, Homo sapiens
tggctctgctctgacca

SEQ ID NO: 737 - DNA, 17 bp, Homo sapiens
ggctctgctctgaccaa

SEQ ID NO: 738 - DNA, 17 bp, Homo sapiens
gctctgctctgaccaac

SEQ ID NO: 739 - DNA, 17 bp, Homo sapiens
ctctgctctgaccaacg

SEQ ID NO: 740 - DNA, 17 bp, Homo sapiens
tctgctctgaccaacgg

SEQ ID NO: 741 - DNA, 17 bp, Homo sapiens
ctgctctgaccaacggg

SEQ ID NO: 742 - DNA, 17 bp, Homo sapiens
tgctctgaccaacgggg

SEQ ID NO: 743 - DNA, 17 bp, Homo sapiens
gctctgaccaacggggg

SEQ ID NO: 744 - DNA, 17 bp, Homo sapiens
ctctgaccaacggggga

SEQ ID NO: 745 - DNA, 17 bp, Homo sapiens
tctgaccaacgggggat

SEQ ID NO: 746 - DNA, 17 bp, Homo sapiens
ctgaccaacgggggatt

SEQ ID NO: 747 - DNA, 17 bp, Homo sapiens
tgaccaacgggggattg

SEQ ID NO: 748 - DNA, 17 bp, Homo sapiens
gaccaacgggggattga

SEQ ID NO: 749 - DNA, 17 bp, Homo sapiens
accaacgggggattgaa

SEQ ID NO: 750 - DNA, 17 bp, Homo sapiens
ccaacgggggattgaac

SEQ ID NO: 751 - DNA, 17 bp, Homo sapiens
caacgggggattgaacc

SEQ ID NO: 752 - DNA, 17 bp, Homo sapiens
aacgggggattgaacct

SEQ ID NO: 753 - DNA, 17 bp, Homo sapiens
acgggggattgaacctg

SEQ ID NO: 754 - DNA, 17 bp, Homo sapiens
cgggggattgaacctgc

SEQ ID NO: 755 - DNA, 17 bp, Homo sapiens
gggggattgaacctgca

SEQ ID NO: 756 - DNA, 17 bp, Homo sapiens
ggggattgaacctgcac

SEQ ID NO: 757 - DNA, 17 bp, Homo sapiens
gggattgaacctgcaca

SEQ ID NO: 758 - DNA, 17 bp, Homo sapiens
ggattgaacctgcacag

SEQ ID NO: 759 - DNA, 17 bp, Homo sapiens
gattgaacctgcacagt

SEQ ID NO: 760 - DNA, 17 bp, Homo sapiens
attgaacctgcacagtc

SEQ ID NO: 761 - DNA, 17 bp, Homo sapiens
ttgaacctgcacagtcc

SEQ ID NO: 762 - DNA, 17 bp, Homo sapiens
tgaacctgcacagtcca

SEQ ID NO: 763 - DNA, 17 bp, Homo sapiens
gaacctgcacagtccag

SEQ ID NO: 764 - DNA, 17 bp, Homo sapiens
aacctgcacagtccagt

SEQ ID NO: 765 - DNA, 17 bp, Homo sapiens
acctgcacagtccagtg

SEQ ID NO: 766 - DNA, 17 bp, Homo sapiens
cctgcacagtccagtga

SEQ ID NO: 767 - DNA, 17 bp, Homo sapiens
ctgcacagtccagtgaa

SEQ ID NO: 768 - DNA, 17 bp, Homo sapiens
tgcacagtccagtgaag

SEQ ID NO: 769 - DNA, 17 bp, Homo sapiens
gcacagtccagtgaaga

SEQ ID NO: 770 - DNA, 17 bp, Homo sapiens
cacagtccagtgaagag

SEQ ID NO: 771 - DNA, 17 bp, Homo sapiens
acagtccagtgaagagg

SEQ ID NO: 772 - DNA, 17 bp, Homo sapiens
cagtccagtgaagagga

SEQ ID NO: 773 - DNA, 17 bp, Homo sapiens
agtccagtgaagaggaa

SEQ ID NO: 774 - DNA, 17 bp, Homo sapiens
gtccagtgaagaggaag

SEQ ID NO: 775 - DNA, 17 bp, Homo sapiens
tccagtgaagaggaagc

SEQ ID NO: 776 - DNA, 17 bp, Homo sapiens
ccagtgaagaggaagct

SEQ ID NO: 777 - DNA, 17 bp, Homo sapiens
cagtgaagaggaagctg

SEQ ID NO: 778 - DNA, 25 bp, Homo sapiens
cacacgcgcacatcggtaccccgcg

SEQ ID NO: 779 - DNA, 25 bp, Homo sapiens
acacgcgcacatcggtaccccgcgc

SEQ ID NO: 780 - DNA, 25 bp, Homo sapiens
cacgcgcacatcggtaccccgcgcg

SEQ ID NO: 781 - DNA, 25 bp, Homo sapiens
acgcgcacatcggtaccccgcgcgc

SEQ ID NO: 782 - DNA, 25 bp, Homo sapiens
cgcgcacatcggtaccccgcgcgca

SEQ ID NO: 783 - DNA, 25 bp, Homo sapiens
gcgcacatcggtaccccgcgcgcac

SEQ ID NO: 784 - DNA, 25 bp, Homo sapiens
cgcacatcggtaccccgcgcgcaca

SEQ ID NO: 785 - DNA, 25 bp, Homo sapiens
gcacatcggtaccccgcgcgcacac

SEQ ID NO: 786 - DNA, 25 bp, Homo sapiens
cacatcggtaccccgcgcgcacacg

SEQ ID NO: 787 - DNA, 25 bp, Homo sapiens
acatcggtaccccgcgcgcacacgc

SEQ ID NO: 788 - DNA, 25 bp, Homo sapiens
catcggtaccccgcgcgcacacgca

SEQ ID NO: 789 - DNA, 25 bp, Homo sapiens
atcggtaccccgcgcgcacacgcac

SEQ ID NO: 790 - DNA, 25 bp, Homo sapiens
tcggtaccccgcgcgcacacgcacg

SEQ ID NO: 791 - DNA, 25 bp, Homo sapiens
cggtaccccgcgcgcacacgcacgg

SEQ ID NO: 792 - DNA, 25 bp, Homo sapiens
ggtaccccgcgcgcacacgcacgga

SEQ ID NO: 793 - DNA, 25 bp, Homo sapiens
gtaccccgcgcgcacacgcacggag

SEQ ID NO: 794 - DNA, 25 bp, Homo sapiens
taccccgcgcgcacacgcacggagg

SEQ ID NO: 795 - DNA, 25 bp, Homo sapiens
accccgcgcgcacacgcacggaggg

SEQ ID NO: 796 - DNA, 25 bp, Homo sapiens
ccccgcgcgcacacgcacggagggc

SEQ ID NO: 797 - DNA, 25 bp, Homo sapiens
cccgcgcgcacacgcacggagggct

SEQ ID NO: 798 - DNA, 25 bp, Homo sapiens
ccgcgcgcacacgcacggagggctg

SEQ ID NO: 799 - DNA, 25 bp, Homo sapiens
cgcgcgcacacgcacggagggctgc

SEQ ID NO: 800 - DNA, 25 bp, Homo sapiens
gcgcgcacacgcacggagggctgcg

SEQ ID NO: 801 - DNA, 25 bp, Homo sapiens
cgcgcacacgcacggagggctgcga

SEQ ID NO: 802 - DNA, 25 bp, Homo sapiens
gcgcacacgcacggagggctgcgag

SEQ ID NO: 803 - DNA, 25 bp, Homo sapiens
cgcacacgcacggagggctgcgagc

SEQ ID NO: 804 - DNA, 25 bp, Homo sapiens
gcacacgcacggagggctgcgagcg

SEQ ID NO: 805 - DNA, 25 bp, Homo sapiens
cacacgcacggagggctgcgagcga

SEQ ID NO: 806 - DNA, 25 bp, Homo sapiens
acacgcacggagggctgcgagcgag

SEQ ID NO: 807 - DNA, 25 bp, Homo sapiens
cacgcacggagggctgcgagcgagc

SEQ ID NO: 808 - DNA, 25 bp, Homo sapiens
acgcacggagggctgcgagcgagca

SEQ ID NO: 809 - DNA, 25 bp, Homo sapiens
cgcacggagggctgcgagcgagcag

SEQ ID NO: 810 - DNA, 25 bp, Homo sapiens
gcacggagggctgcgagcgagcaga

SEQ ID NO: 811 - DNA, 25 bp, Homo sapiens
cacggagggctgcgagcgagcagac

SEQ ID NO: 812 - DNA, 25 bp, Homo sapiens
acggagggctgcgagcgagcagacg

SEQ ID NO: 813 - DNA, 25 bp, Homo sapiens
cggagggctgcgagcgagcagacgc

SEQ ID NO: 814 - DNA, 25 bp, Homo sapiens
ggagggctgcgagcgagcagacgcg

SEQ ID NO: 815 - DNA, 25 bp, Homo sapiens
gagggctgcgagcgagcagacgcgc

SEQ ID NO: 816 - DNA, 25 bp, Homo sapiens
agggctgcgagcgagcagacgcgca

SEQ ID NO: 817 - DNA, 25 bp, Homo sapiens
gggctgcgagcgagcagacgcgcac

SEQ ID NO: 818 - DNA, 25 bp, Homo sapiens
ggctgcgagcgagcagacgcgcaca

SEQ ID NO: 819 - DNA, 25 bp, Homo sapiens
gctgcgagcgagcagacgcgcacac

SEQ ID NO: 820 - DNA, 25 bp, Homo sapiens
ctgcgagcgagcagacgcgcacacc

SEQ ID NO: 821 - DNA, 25 bp, Homo sapiens
tgcgagcgagcagacgcgcacaccg

SEQ ID NO: 822 - DNA, 25 bp, Homo sapiens
gcgagcgagcagacgcgcacaccgg

SEQ ID NO: 823 - DNA, 25 bp, Homo sapiens
cgagcgagcagacgcgcacaccggc

SEQ ID NO: 824 - DNA, 25 bp, Homo sapiens
gagcgagcagacgcgcacaccggcg

SEQ ID NO: 825 - DNA, 25 bp, Homo sapiens
agcgagcagacgcgcacaccggcga

SEQ ID NO: 826 - DNA, 25 bp, Homo sapiens
gcgagcagacgcgcacaccggcgag

SEQ ID NO: 827 - DNA, 25 bp, Homo sapiens
cgagcagacgcgcacaccggcgagc

SEQ ID NO: 828 - DNA, 25 bp, Homo sapiens
gagcagacgcgcacaccggcgagcc

SEQ ID NO: 829 - DNA, 25 bp, Homo sapiens
agcagacgcgcacaccggcgagcca

SEQ ID NO: 830 - DNA, 25 bp, Homo sapiens
gcagacgcgcacaccggcgagccaa

SEQ ID NO: 831 - DNA, 25 bp, Homo sapiens
cagacgcgcacaccggcgagccaag

SEQ ID NO: 832 - DNA, 25 bp, Homo sapiens
agacgcgcacaccggcgagccaagt

SEQ ID NO: 833 - DNA, 25 bp, Homo sapiens
gacgcgcacaccggcgagccaagtt

SEQ ID NO: 834 - DNA, 25 bp, Homo sapiens
acgcgcacaccggcgagccaagttc

SEQ ID NO: 835 - DNA, 25 bp, Homo sapiens
cgcgcacaccggcgagccaagttcc

SEQ ID NO: 836 - DNA, 25 bp, Homo sapiens
gcgcacaccggcgagccaagttccg

SEQ ID NO: 837 - DNA, 25 bp, Homo sapiens
cgcacaccggcgagccaagttccgc

SEQ ID NO: 838 - DNA, 25 bp, Homo sapiens
gcacaccggcgagccaagttccgca

SEQ ID NO: 839 - DNA, 25 bp, Homo sapiens
cacaccggcgagccaagttccgcag

SEQ ID NO: 840 - DNA, 25 bp, Homo sapiens
acaccggcgagccaagttccgcagc

SEQ ID NO: 841 - DNA, 25 bp, Homo sapiens
caccggcgagccaagttccgcagcc

SEQ ID NO: 842 - DNA, 25 bp, Homo sapiens
accggcgagccaagttccgcagcct

SEQ ID NO: 843 - DNA, 25 bp, Homo sapiens
ccggcgagccaagttccgcagcctg

SEQ ID NO: 844 - DNA, 25 bp, Homo sapiens
cggcgagccaagttccgcagcctgg

SEQ ID NO: 845 - DNA, 25 bp, Homo sapiens
ggcgagccaagttccgcagcctggc

SEQ ID NO: 846 - DNA, 25 bp, Homo sapiens
gcgagccaagttccgcagcctggca

SEQ ID NO: 847 - DNA, 25 bp, Homo sapiens
cgagccaagttccgcagcctggcat

SEQ ID NO: 848 - DNA, 25 bp, Homo sapiens
gagccaagttccgcagcctggcatg

SEQ ID NO: 849 - DNA, 25 bp, Homo sapiens
agccaagttccgcagcctggcatgg

SEQ ID NO: 850 - DNA, 25 bp, Homo sapiens
gccaagttccgcagcctggcatggc

SEQ ID NO: 851 - DNA, 25 bp, Homo sapiens
ccaagttccgcagcctggcatggct

SEQ ID NO: 852 - DNA, 25 bp, Homo sapiens
caagttccgcagcctggcatggctt

SEQ ID NO: 853 - DNA, 25 bp, Homo sapiens
aagttccgcagcctggcatggcttc

SEQ ID NO: 854 - DNA, 25 bp, Homo sapiens
agttccgcagcctggcatggcttct

SEQ ID NO: 855 - DNA, 25 bp, Homo sapiens
gttccgcagcctggcatggcttctg

SEQ ID NO: 856 - DNA, 25 bp, Homo sapiens
ttccgcagcctggcatggcttctgg

SEQ ID NO: 857 - DNA, 25 bp, Homo sapiens
tccgcagcctggcatggcttctggg

SEQ ID NO: 858 - DNA, 25 bp, Homo sapiens
ccgcagcctggcatggcttctgggg

SEQ ID NO: 859 - DNA, 25 bp, Homo sapiens
cgcagcctggcatggcttctgggga

SEQ ID NO: 860 - DNA, 25 bp, Homo sapiens
gcagcctggcatggcttctggggac

SEQ ID NO: 861 - DNA, 25 bp, Homo sapiens
cagcctggcatggcttctggggacc

SEQ ID NO: 862 - DNA, 25 bp, Homo sapiens
agcctggcatggcttctggggacct

SEQ ID NO: 863 - DNA, 25 bp, Homo sapiens
gcctggcatggcttctggggacctt

SEQ ID NO: 864 - DNA, 25 bp, Homo sapiens
cctggcatggcttctggggaccttt

SEQ ID NO: 865 - DNA, 25 bp, Homo sapiens
ctggcatggcttctggggaccttta

SEQ ID NO: 866 - DNA, 25 bp, Homo sapiens
tggcatggcttctggggacctttac

SEQ ID NO: 867 - DNA, 25 bp, Homo sapiens
ggcatggcttctggggacctttacg

SEQ ID NO: 868 - DNA, 25 bp, Homo sapiens
gcatggcttctggggacctttacga

SEQ ID NO: 869 - DNA, 25 bp, Homo sapiens
catggcttctggggacctttacgag

SEQ ID NO: 870 - DNA, 25 bp, Homo sapiens
atggcttctggggacctttacgagg

SEQ ID NO: 871 - DNA, 25 bp, Homo sapiens
tggcttctggggacctttacgaggt

SEQ ID NO: 872 - DNA, 25 bp, Homo sapiens
ggcttctggggacctttacgaggtt

SEQ ID NO: 873 - DNA, 25 bp, Homo sapiens
gcttctggggacctttacgaggttg

SEQ ID NO: 874 - DNA, 25 bp, Homo sapiens
cttctggggacctttacgaggttga

SEQ ID NO: 875 - DNA, 25 bp, Homo sapiens
ttctggggacctttacgaggttgaa

SEQ ID NO: 876 - DNA, 25 bp, Homo sapiens
tctggggacctttacgaggttgaaa

SEQ ID NO: 877 - DNA, 25 bp, Homo sapiens
ctggggacctttacgaggttgaaag

SEQ ID NO: 878 - DNA, 25 bp, Homo sapiens
tggggacctttacgaggttgaaagg

SEQ ID NO: 879 - DNA, 25 bp, Homo sapiens
ggggacctttacgaggttgaaagga

SEQ ID NO: 880 - DNA, 25 bp, Homo sapiens
gggacctttacgaggttgaaaggat

SEQ ID NO: 881 - DNA, 25 bp, Homo sapiens
ggacctttacgaggttgaaaggatt

SEQ ID NO: 882 - DNA, 25 bp, Homo sapiens
gacctttacgaggttgaaaggattg

SEQ ID NO: 883 - DNA, 25 bp, Homo sapiens
acctttacgaggttgaaaggattgt

SEQ ID NO: 884 - DNA, 25 bp, Homo sapiens
cctttacgaggttgaaaggattgta

SEQ ID NO: 885 - DNA, 25 bp, Homo sapiens
ctttacgaggttgaaaggattgtag

SEQ ID NO: 886 - DNA, 25 bp, Homo sapiens
tttacgaggttgaaaggattgtaga

SEQ ID NO: 887 - DNA, 25 bp, Homo sapiens
ttacgaggttgaaaggattgtagac

SEQ ID NO: 888 - DNA, 25 bp, Homo sapiens
tacgaggttgaaaggattgtagaca

SEQ ID NO: 889 - DNA, 25 bp, Homo sapiens
acgaggttgaaaggattgtagacaa

SEQ ID NO: 890 - DNA, 25 bp, Homo sapiens
cgaggttgaaaggattgtagacaag

SEQ ID NO: 891 - DNA, 25 bp, Homo sapiens
gaggttgaaaggattgtagacaaga

SEQ ID NO: 892 - DNA, 25 bp, Homo sapiens
aggttgaaaggattgtagacaagag

SEQ ID NO: 893 - DNA, 25 bp, Homo sapiens
ggttgaaaggattgtagacaagagg

SEQ ID NO: 894 - DNA, 25 bp, Homo sapiens
gttgaaaggattgtagacaagagga

SEQ ID NO: 895 - DNA, 25 bp, Homo sapiens
ttgaaaggattgtagacaagaggaa

SEQ ID NO: 896 - DNA, 25 bp, Homo sapiens
tgaaaggattgtagacaagaggaag

SEQ ID NO: 897 - DNA, 25 bp, Homo sapiens
gaaaggattgtagacaagaggaaga

SEQ ID NO: 898 - DNA, 25 bp, Homo sapiens
aaaggattgtagacaagaggaagaa

SEQ ID NO: 899 - DNA, 25 bp, Homo sapiens
aaggattgtagacaagaggaagaac

SEQ ID NO: 900 - DNA, 25 bp, Homo sapiens
aggattgtagacaagaggaagaaca

SEQ ID NO: 901 - DNA, 25 bp, Homo sapiens
ggattgtagacaagaggaagaacaa

SEQ ID NO: 902 - DNA, 25 bp, Homo sapiens
gattgtagacaagaggaagaacaag

SEQ ID NO: 903 - DNA, 25 bp, Homo sapiens
attgtagacaagaggaagaacaaga

SEQ ID NO: 904 - DNA, 25 bp, Homo sapiens
ttgtagacaagaggaagaacaagaa

SEQ ID NO: 905 - DNA, 25 bp, Homo sapiens
tgtagacaagaggaagaacaagaaa

SEQ ID NO: 906 - DNA, 25 bp, Homo sapiens
gtagacaagaggaagaacaagaaag

SEQ ID NO: 907 - DNA, 25 bp, Homo sapiens
tagacaagaggaagaacaagaaagg

SEQ ID NO: 908 - DNA, 25 bp, Homo sapiens
agacaagaggaagaacaagaaagga

SEQ ID NO: 909 - DNA, 25 bp, Homo sapiens
gacaagaggaagaacaagaaaggaa

SEQ ID NO: 910 - DNA, 25 bp, Homo sapiens
acaagaggaagaacaagaaaggaaa

SEQ ID NO: 911 - DNA, 25 bp, Homo sapiens
caagaggaagaacaagaaaggaaaa

SEQ ID NO: 912 - DNA, 25 bp, Homo sapiens
aagaggaagaacaagaaaggaaaat

SEQ ID NO: 913 - DNA, 25 bp, Homo sapiens
agaggaagaacaagaaaggaaaatg

SEQ ID NO: 914 - DNA, 25 bp, Homo sapiens
gaggaagaacaagaaaggaaaatgg

SEQ ID NO: 915 - DNA, 25 bp, Homo sapiens
aggaagaacaagaaaggaaaatggg

SEQ ID NO: 916 - DNA, 25 bp, Homo sapiens
ggaagaacaagaaaggaaaatggga

SEQ ID NO: 917 - DNA, 25 bp, Homo sapiens
gaagaacaagaaaggaaaatgggag

SEQ ID NO: 918 - DNA, 25 bp, Homo sapiens
aagaacaagaaaggaaaatgggagt

SEQ ID NO: 919 - DNA, 25 bp, Homo sapiens
agaacaagaaaggaaaatgggagta

SEQ ID NO: 920 - DNA, 25 bp, Homo sapiens
gaacaagaaaggaaaatgggagtat

SEQ ID NO: 921 - DNA, 25 bp, Homo sapiens
aacaagaaaggaaaatgggagtatc

SEQ ID NO: 922 - DNA, 25 bp, Homo sapiens
acaagaaaggaaaatgggagtatct

SEQ ID NO: 923 - DNA, 25 bp, Homo sapiens
caagaaaggaaaatgggagtatctt

SEQ ID NO: 924 - DNA, 25 bp, Homo sapiens
aagaaaggaaaatgggagtatctta

SEQ ID NO: 925 - DNA, 25 bp, Homo sapiens
agaaaggaaaatgggagtatcttat

SEQ ID NO: 926 - DNA, 25 bp, Homo sapiens
gaaaggaaaatgggagtatcttatc

SEQ ID NO: 927 - DNA, 25 bp, Homo sapiens
aaaggaaaatgggagtatcttatcc

SEQ ID NO: 928 - DNA, 25 bp, Homo sapiens
aaggaaaatgggagtatcttatccg

SEQ ID NO: 929 - DNA, 25 bp, Homo sapiens
aggaaaatgggagtatcttatccga

SEQ ID NO: 930 - DNA, 25 bp, Homo sapiens
ggaaaatgggagtatcttatccgat

SEQ ID NO: 931 - DNA, 25 bp, Homo sapiens
gaaaatgggagtatcttatccgatg

SEQ ID NO: 932 - DNA, 25 bp, Homo sapiens
aaaatgggagtatcttatccgatgg

SEQ ID NO: 933 - DNA, 25 bp, Homo sapiens
aaatgggagtatcttatccgatgga

SEQ ID NO: 934 - DNA, 25 bp, Homo sapiens
aatgggagtatcttatccgatggaa

SEQ ID NO: 935 - DNA, 25 bp, Homo sapiens
atgggagtatcttatccgatggaaa

SEQ ID NO: 936 - DNA, 25 bp, Homo sapiens
tgggagtatcttatccgatggaaag

SEQ ID NO: 937 - DNA, 25 bp, Homo sapiens
gggagtatcttatccgatggaaagg

SEQ ID NO: 938 - DNA, 25 bp, Homo sapiens
ggagtatcttatccgatggaaaggc

SEQ ID NO: 939 - DNA, 25 bp, Homo sapiens
gagtatcttatccgatggaaaggct

SEQ ID NO: 940 - DNA, 25 bp, Homo sapiens
agtatcttatccgatggaaaggcta

SEQ ID NO: 941 - DNA, 25 bp, Homo sapiens
gtatcttatccgatggaaaggctac

SEQ ID NO: 942 - DNA, 25 bp, Homo sapiens
tatcttatccgatggaaaggctacg

SEQ ID NO: 943 - DNA, 25 bp, Homo sapiens
atcttatccgatggaaaggctacgg

SEQ ID NO: 944 - DNA, 25 bp, Homo sapiens
tcttatccgatggaaaggctacggg

SEQ ID NO: 945 - DNA, 25 bp, Homo sapiens
cttatccgatggaaaggctacggga

SEQ ID NO: 946 - DNA, 25 bp, Homo sapiens
ttatccgatggaaaggctacgggag

SEQ ID NO: 947 - DNA, 25 bp, Homo sapiens
tatccgatggaaaggctacgggagc

SEQ ID NO: 948 - DNA, 25 bp, Homo sapiens
atccgatggaaaggctacgggagca

SEQ ID NO: 949 - DNA, 25 bp, Homo sapiens
tccgatggaaaggctacgggagcac

SEQ ID NO: 950 - DNA, 25 bp, Homo sapiens
ccgatggaaaggctacgggagcacc

SEQ ID NO: 951 - DNA, 25 bp, Homo sapiens
cgatggaaaggctacgggagcaccg

SEQ ID NO: 952 - DNA, 25 bp, Homo sapiens
gatggaaaggctacgggagcaccga

SEQ ID NO: 953 - DNA, 25 bp, Homo sapiens
atggaaaggctacgggagcaccgag

SEQ ID NO: 954 - DNA, 25 bp, Homo sapiens
tggaaaggctacgggagcaccgagg

SEQ ID NO: 955 - DNA, 25 bp, Homo sapiens
ggaaaggctacgggagcaccgagga

SEQ ID NO: 956 - DNA, 25 bp, Homo sapiens
gaaaggctacgggagcaccgaggac

SEQ ID NO: 957 - DNA, 25 bp, Homo sapiens
aaaggctacgggagcaccgaggaca

SEQ ID NO: 958 - DNA, 25 bp, Homo sapiens
aaggctacgggagcaccgaggacac

SEQ ID NO: 959 - DNA, 25 bp, Homo sapiens
aggctacgggagcaccgaggacacg

SEQ ID NO: 960 - DNA, 25 bp, Homo sapiens
ggctacgggagcaccgaggacacgt

SEQ ID NO: 961 - DNA, 25 bp, Homo sapiens
gctacgggagcaccgaggacacgtg

SEQ ID NO: 962 - DNA, 25 bp, Homo sapiens
ctacgggagcaccgaggacacgtgg

SEQ ID NO: 963 - DNA, 25 bp, Homo sapiens
tacgggagcaccgaggacacgtggg

SEQ ID NO: 964 - DNA, 25 bp, Homo sapiens
acgggagcaccgaggacacgtggga

SEQ ID NO: 965 - DNA, 25 bp, Homo sapiens
cgggagcaccgaggacacgtgggag

SEQ ID NO: 966 - DNA, 25 bp, Homo sapiens
gggagcaccgaggacacgtgggagc

SEQ ID NO: 967 - DNA, 25 bp, Homo sapiens
ggagcaccgaggacacgtgggagcc

SEQ ID NO: 968 - DNA, 25 bp, Homo sapiens
gagcaccgaggacacgtgggagccg

SEQ ID NO: 969 - DNA, 25 bp, Homo sapiens
agcaccgaggacacgtgggagccgg

SEQ ID NO: 970 - DNA, 25 bp, Homo sapiens
gcaccgaggacacgtgggagccgga

SEQ ID NO: 971 - DNA, 25 bp, Homo sapiens
caccgaggacacgtgggagccggag

SEQ ID NO: 972 - DNA, 25 bp, Homo sapiens
accgaggacacgtgggagccggagc

SEQ ID NO: 973 - DNA, 25 bp, Homo sapiens
ccgaggacacgtgggagccggagca

SEQ ID NO: 974 - DNA, 25 bp, Homo sapiens
cgaggacacgtgggagccggagcac

SEQ ID NO: 975 - DNA, 25 bp, Homo sapiens
gaggacacgtgggagccggagcacc

SEQ ID NO: 976 - DNA, 25 bp, Homo sapiens
aggacacgtgggagccggagcacca

SEQ ID NO: 977 - DNA, 25 bp, Homo sapiens
ggacacgtgggagccggagcaccac

SEQ ID NO: 978 - DNA, 25 bp, Homo sapiens
gacacgtgggagccggagcaccacc

SEQ ID NO: 979 - DNA, 25 bp, Homo sapiens
acacgtgggagccggagcaccacct

SEQ ID NO: 980 - DNA, 25 bp, Homo sapiens
cacgtgggagccggagcaccacctc

SEQ ID NO: 981 - DNA, 25 bp, Homo sapiens
acgtgggagccggagcaccacctct

SEQ ID NO: 982 - DNA, 25 bp, Homo sapiens
cgtgggagccggagcaccacctctt

SEQ ID NO: 983 - DNA, 25 bp, Homo sapiens
gtgggagccggagcaccacctcttg

SEQ ID NO: 984 - DNA, 25 bp, Homo sapiens
tgggagccggagcaccacctcttgc

SEQ ID NO: 985 - DNA, 25 bp, Homo sapiens
gggagccggagcaccacctcttgca

SEQ ID NO: 986 - DNA, 25 bp, Homo sapiens
ggagccggagcaccacctcttgcac

SEQ ID NO: 987 - DNA, 25 bp, Homo sapiens
gagccggagcaccacctcttgcact

SEQ ID NO: 988 - DNA, 25 bp, Homo sapiens
agccggagcaccacctcttgcactg

SEQ ID NO: 989 - DNA, 25 bp, Homo sapiens
gccggagcaccacctcttgcactgt

SEQ ID NO: 990 - DNA, 25 bp, Homo sapiens
ccggagcaccacctcttgcactgtg

SEQ ID NO: 991 - DNA, 25 bp, Homo sapiens
cggagcaccacctcttgcactgtga

SEQ ID NO: 992 - DNA, 25 bp, Homo sapiens
ggagcaccacctcttgcactgtgag

SEQ ID NO: 993 - DNA, 25 bp, Homo sapiens
gagcaccacctcttgcactgtgagg

SEQ ID NO: 994 - DNA, 25 bp, Homo sapiens
agcaccacctcttgcactgtgagga

SEQ ID NO: 995 - DNA, 25 bp, Homo sapiens
gcaccacctcttgcactgtgaggag

SEQ ID NO: 996 - DNA, 25 bp, Homo sapiens
caccacctcttgcactgtgaggagt

SEQ ID NO: 997 - DNA, 25 bp, Homo sapiens
accacctcttgcactgtgaggagtt

SEQ ID NO: 998 - DNA, 25 bp, Homo sapiens
ccacctcttgcactgtgaggagttt

SEQ ID NO: 999 - DNA, 25 bp, Homo sapiens
cacctcttgcactgtgaggagttta

SEQ ID NO: 1000 - DNA, 25 bp, Homo sapiens
acctcttgcactgtgaggagtttat

SEQ ID NO: 1001 - DNA, 25 bp, Homo sapiens
cctcttgcactgtgaggagtttatt

SEQ ID NO: 1002 - DNA, 25 bp, Homo sapiens
ctcttgcactgtgaggagtttattg

SEQ ID NO: 1003 - DNA, 25 bp, Homo sapiens
tcttgcactgtgaggagtttattga

SEQ ID NO: 1004 - DNA, 25 bp, Homo sapiens
cttgcactgtgaggagtttattgat

SEQ ID NO: 1005 - DNA, 25 bp, Homo sapiens
ttgcactgtgaggagtttattgatg

SEQ ID NO: 1006 - DNA, 25 bp, Homo sapiens
tgcactgtgaggagtttattgatga

SEQ ID NO: 1007 - DNA, 25 bp, Homo sapiens
gcactgtgaggagtttattgatgaa

SEQ ID NO: 1008 - DNA, 25 bp, Homo sapiens
cactgtgaggagtttattgatgaat

SEQ ID NO: 1009 - DNA, 25 bp, Homo sapiens
actgtgaggagtttattgatgaatt

SEQ ID NO: 1010 - DNA, 25 bp, Homo sapiens
ctgtgaggagtttattgatgaattc

SEQ ID NO: 1011 - DNA, 25 bp, Homo sapiens
tgtgaggagtttattgatgaattca

SEQ ID NO: 1012 - DNA, 25 bp, Homo sapiens
gtgaggagtttattgatgaattcaa

SEQ ID NO: 1013 - DNA, 25 bp, Homo sapiens
tgaggagtttattgatgaattcaat

SEQ ID NO: 1014 - DNA, 25 bp, Homo sapiens
gaggagtttattgatgaattcaatg

SEQ ID NO: 1015 - DNA, 25 bp, Homo sapiens
aggagtttattgatgaattcaatgg

SEQ ID NO: 1016 - DNA, 25 bp, Homo sapiens
ggagtttattgatgaattcaatggg

SEQ ID NO: 1017 - DNA, 25 bp, Homo sapiens
gagtttattgatgaattcaatgggt

SEQ ID NO: 1018 - DNA, 25 bp, Homo sapiens
agtttattgatgaattcaatgggtt

SEQ ID NO: 1019 - DNA, 25 bp, Homo sapiens
gtttattgatgaattcaatgggttg

SEQ ID NO: 1020 - DNA, 25 bp, Homo sapiens
tttattgatgaattcaatgggttgc

SEQ ID NO: 1021 - DNA, 25 bp, Homo sapiens
ttattgatgaattcaatgggttgca

SEQ ID NO: 1022 - DNA, 25 bp, Homo sapiens
tattgatgaattcaatgggttgcac

SEQ ID NO: 1023 - DNA, 25 bp, Homo sapiens
attgatgaattcaatgggttgcaca

SEQ ID NO: 1024 - DNA, 25 bp, Homo sapiens
ttgatgaattcaatgggttgcacat

SEQ ID NO: 1025 - DNA, 25 bp, Homo sapiens
tgatgaattcaatgggttgcacatg

SEQ ID NO: 1026 - DNA, 25 bp, Homo sapiens
gatgaattcaatgggttgcacatgt

SEQ ID NO: 1027 - DNA, 25 bp, Homo sapiens
atgaattcaatgggttgcacatgtc

SEQ ID NO: 1028 - DNA, 25 bp, Homo sapiens
tgaattcaatgggttgcacatgtcc

SEQ ID NO: 1029 - DNA, 25 bp, Homo sapiens
gaattcaatgggttgcacatgtcca

SEQ ID NO: 1030 - DNA, 25 bp, Homo sapiens
aattcaatgggttgcacatgtccaa

SEQ ID NO: 1031 - DNA, 25 bp, Homo sapiens
attcaatgggttgcacatgtccaag

SEQ ID NO: 1032 - DNA, 25 bp, Homo sapiens
ttcaatgggttgcacatgtccaagg

SEQ ID NO: 1033 - DNA, 25 bp, Homo sapiens
tcaatgggttgcacatgtccaagga

SEQ ID NO: 1034 - DNA, 25 bp, Homo sapiens
caatgggttgcacatgtccaaggac

SEQ ID NO: 1035 - DNA, 25 bp, Homo sapiens
aatgggttgcacatgtccaaggaca

SEQ ID NO: 1036 - DNA, 25 bp, Homo sapiens
atgggttgcacatgtccaaggacaa

SEQ ID NO: 1037 - DNA, 25 bp, Homo sapiens
tgggttgcacatgtccaaggacaag

SEQ ID NO: 1038 - DNA, 25 bp, Homo sapiens
gggttgcacatgtccaaggacaaga

SEQ ID NO: 1039 - DNA, 25 bp, Homo sapiens
ggttgcacatgtccaaggacaagag

SEQ ID NO: 1040 - DNA, 25 bp, Homo sapiens
gttgcacatgtccaaggacaagagg

SEQ ID NO: 1041 - DNA, 25 bp, Homo sapiens
ttgcacatgtccaaggacaagagga

SEQ ID NO: 1042 - DNA, 25 bp, Homo sapiens
tgcacatgtccaaggacaagaggat

SEQ ID NO: 1043 - DNA, 25 bp, Homo sapiens
gcacatgtccaaggacaagaggatc

SEQ ID NO: 1044 - DNA, 25 bp, Homo sapiens
cacatgtccaaggacaagaggatca

SEQ ID NO: 1045 - DNA, 25 bp, Homo sapiens
acatgtccaaggacaagaggatcaa

SEQ ID NO: 1046 - DNA, 25 bp, Homo sapiens
catgtccaaggacaagaggatcaag

SEQ ID NO: 1047 - DNA, 25 bp, Homo sapiens
atgtccaaggacaagaggatcaagt

SEQ ID NO: 1048 - DNA, 25 bp, Homo sapiens
tgtccaaggacaagaggatcaagtc

SEQ ID NO: 1049 - DNA, 25 bp, Homo sapiens
gtccaaggacaagaggatcaagtca

SEQ ID NO: 1050 - DNA, 25 bp, Homo sapiens
tccaaggacaagaggatcaagtcag

SEQ ID NO: 1051 - DNA, 25 bp, Homo sapiens
ccaaggacaagaggatcaagtcagg

SEQ ID NO: 1052 - DNA, 25 bp, Homo sapiens
caaggacaagaggatcaagtcaggg

SEQ ID NO: 1053 - DNA, 25 bp, Homo sapiens
aaggacaagaggatcaagtcaggga

SEQ ID NO: 1054 - DNA, 25 bp, Homo sapiens
aggacaagaggatcaagtcagggaa

SEQ ID NO: 1055 - DNA, 25 bp, Homo sapiens
ggacaagaggatcaagtcagggaag

SEQ ID NO: 1056 - DNA, 25 bp, Homo sapiens
gacaagaggatcaagtcagggaagc

SEQ ID NO: 1057 - DNA, 25 bp, Homo sapiens
acaagaggatcaagtcagggaagca

SEQ ID NO: 1058 - DNA, 25 bp, Homo sapiens
caagaggatcaagtcagggaagcag

SEQ ID NO: 1059 - DNA, 25 bp, Homo sapiens
aagaggatcaagtcagggaagcagt

SEQ ID NO: 1060 - DNA, 25 bp, Homo sapiens
agaggatcaagtcagggaagcagtc

SEQ ID NO: 1061 - DNA, 25 bp, Homo sapiens
gaggatcaagtcagggaagcagtcc

SEQ ID NO: 1062 - DNA, 25 bp, Homo sapiens
aggatcaagtcagggaagcagtcca

SEQ ID NO: 1063 - DNA, 25 bp, Homo sapiens
ggatcaagtcagggaagcagtccag

SEQ ID NO: 1064 - DNA, 25 bp, Homo sapiens
gatcaagtcagggaagcagtccagt

SEQ ID NO: 1065 - DNA, 25 bp, Homo sapiens
atcaagtcagggaagcagtccagta

SEQ ID NO: 1066 - DNA, 25 bp, Homo sapiens
tcaagtcagggaagcagtccagtac

SEQ ID NO: 1067 - DNA, 25 bp, Homo sapiens
caagtcagggaagcagtccagtacc

SEQ ID NO: 1068 - DNA, 25 bp, Homo sapiens
aagtcagggaagcagtccagtacct

SEQ ID NO: 1069 - DNA, 25 bp, Homo sapiens
agtcagggaagcagtccagtacctc

SEQ ID NO: 1070 - DNA, 25 bp, Homo sapiens
gtcagggaagcagtccagtacctcc

SEQ ID NO: 1071 - DNA, 25 bp, Homo sapiens
tcagggaagcagtccagtacctcca

SEQ ID NO: 1072 - DNA, 25 bp, Homo sapiens
cagggaagcagtccagtacctccaa

SEQ ID NO: 1073 - DNA, 25 bp, Homo sapiens
agggaagcagtccagtacctccaag

SEQ ID NO: 1074 - DNA, 25 bp, Homo sapiens
gggaagcagtccagtacctccaagc

SEQ ID NO: 1075 - DNA, 25 bp, Homo sapiens
ggaagcagtccagtacctccaagct

SEQ ID NO: 1076 - DNA, 25 bp, Homo sapiens
gaagcagtccagtacctccaagctg

SEQ ID NO: 1077 - DNA, 25 bp, Homo sapiens
aagcagtccagtacctccaagctgc

SEQ ID NO: 1078 - DNA, 25 bp, Homo sapiens
agcagtccagtacctccaagctgct

SEQ ID NO: 1079 - DNA, 25 bp, Homo sapiens
gcagtccagtacctccaagctgctg

SEQ ID NO: 1080 - DNA, 25 bp, Homo sapiens
cagtccagtacctccaagctgctgc

SEQ ID NO: 1081 - DNA, 25 bp, Homo sapiens
agtccagtacctccaagctgctgcg

SEQ ID NO: 1082 - DNA, 25 bp, Homo sapiens
gtccagtacctccaagctgctgcgt

SEQ ID NO: 1083 - DNA, 25 bp, Homo sapiens
tccagtacctccaagctgctgcgtg

SEQ ID NO: 1084 - DNA, 25 bp, Homo sapiens
ccagtacctccaagctgctgcgtga

SEQ ID NO: 1085 - DNA, 25 bp, Homo sapiens
cagtacctccaagctgctgcgtgac

SEQ ID NO: 1086 - DNA, 25 bp, Homo sapiens
agtacctccaagctgctgcgtgaca

SEQ ID NO: 1087 - DNA, 25 bp, Homo sapiens
gtacctccaagctgctgcgtgacag

SEQ ID NO: 1088 - DNA, 25 bp, Homo sapiens
tacctccaagctgctgcgtgacagt

SEQ ID NO: 1089 - DNA, 25 bp, Homo sapiens
acctccaagctgctgcgtgacagtc

SEQ ID NO: 1090 - DNA, 25 bp, Homo sapiens
cctccaagctgctgcgtgacagtcg

SEQ ID NO: 1091 - DNA, 25 bp, Homo sapiens
ctccaagctgctgcgtgacagtcga

SEQ ID NO: 1092 - DNA, 25 bp, Homo sapiens
tccaagctgctgcgtgacagtcgag

SEQ ID NO: 1093 - DNA, 25 bp, Homo sapiens
ccaagctgctgcgtgacagtcgagg

SEQ ID NO: 1094 - DNA, 25 bp, Homo sapiens
caagctgctgcgtgacagtcgaggc

SEQ ID NO: 1095 - DNA, 25 bp, Homo sapiens
aagctgctgcgtgacagtcgaggcc

SEQ ID NO: 1096 - DNA, 25 bp, Homo sapiens
agctgctgcgtgacagtcgaggccc

SEQ ID NO: 1097 - DNA, 25 bp, Homo sapiens
gctgctgcgtgacagtcgaggcccg

SEQ ID NO: 1098 - DNA, 25 bp, Homo sapiens
ctgctgcgtgacagtcgaggcccgt

SEQ ID NO: 1099 - DNA, 25 bp, Homo sapiens
tgctgcgtgacagtcgaggcccgtc

SEQ ID NO: 1100 - DNA, 25 bp, Homo sapiens
gctgcgtgacagtcgaggcccgtcg

SEQ ID NO: 1101 - DNA, 25 bp, Homo sapiens
ctgcgtgacagtcgaggcccgtcgg

SEQ ID NO: 1102 - DNA, 25 bp, Homo sapiens
tgcgtgacagtcgaggcccgtcggt

SEQ ID NO: 1103 - DNA, 25 bp, Homo sapiens
gcgtgacagtcgaggcccgtcggtt

SEQ ID NO: 1104 - DNA, 25 bp, Homo sapiens
cgtgacagtcgaggcccgtcggttg

SEQ ID NO: 1105 - DNA, 25 bp, Homo sapiens
gtgacagtcgaggcccgtcggttga

SEQ ID NO: 1106 - DNA, 25 bp, Homo sapiens
tgacagtcgaggcccgtcggttgag

SEQ ID NO: 1107 - DNA, 25 bp, Homo sapiens
gacagtcgaggcccgtcggttgaga

SEQ ID NO: 1108 - DNA, 25 bp, Homo sapiens
acagtcgaggcccgtcggttgagaa

SEQ ID NO: 1109 - DNA, 25 bp, Homo sapiens
cagtcgaggcccgtcggttgagaaa

SEQ ID NO: 1110 - DNA, 25 bp, Homo sapiens
agtcgaggcccgtcggttgagaaac

SEQ ID NO: 1111 - DNA, 25 bp, Homo sapiens
gtcgaggcccgtcggttgagaaact

SEQ ID NO: 1112 - DNA, 25 bp, Homo sapiens
tcgaggcccgtcggttgagaaactg

SEQ ID NO: 1113 - DNA, 25 bp, Homo sapiens
cgaggcccgtcggttgagaaactgt

SEQ ID NO: 1114 - DNA, 25 bp, Homo sapiens
gaggcccgtcggttgagaaactgtc

SEQ ID NO: 1115 - DNA, 25 bp, Homo sapiens
aggcccgtcggttgagaaactgtcc

SEQ ID NO: 1116 - DNA, 25 bp, Homo sapiens
ggcccgtcggttgagaaactgtccc

SEQ ID NO: 1117 - DNA, 25 bp, Homo sapiens
gcccgtcggttgagaaactgtccca

SEQ ID NO: 1118 - DNA, 25 bp, Homo sapiens
cccgtcggttgagaaactgtcccac

SEQ ID NO: 1119 - DNA, 25 bp, Homo sapiens
ccgtcggttgagaaactgtcccaca

SEQ ID NO: 1120 - DNA, 25 bp, Homo sapiens
cgtcggttgagaaactgtcccacag

SEQ ID NO: 1121 - DNA, 25 bp, Homo sapiens
gtcggttgagaaactgtcccacaga

SEQ ID NO: 1122 - DNA, 25 bp, Homo sapiens
tcggttgagaaactgtcccacagac

SEQ ID NO: 1123 - DNA, 25 bp, Homo sapiens
cggttgagaaactgtcccacagacc

SEQ ID NO: 1124 - DNA, 25 bp, Homo sapiens
ggttgagaaactgtcccacagacct

SEQ ID NO: 1125 - DNA, 25 bp, Homo sapiens
gttgagaaactgtcccacagacctt

SEQ ID NO: 1126 - DNA, 25 bp, Homo sapiens
ttgagaaactgtcccacagaccttc

SEQ ID NO: 1127 - DNA, 25 bp, Homo sapiens
tgagaaactgtcccacagaccttca

SEQ ID NO: 1128 - DNA, 25 bp, Homo sapiens
gagaaactgtcccacagaccttcag

SEQ ID NO: 1129 - DNA, 25 bp, Homo sapiens
agaaactgtcccacagaccttcaga

SEQ ID NO: 1130 - DNA, 25 bp, Homo sapiens
gaaactgtcccacagaccttcagat

SEQ ID NO: 1131 - DNA, 25 bp, Homo sapiens
aaactgtcccacagaccttcagatc

SEQ ID NO: 1132 - DNA, 25 bp, Homo sapiens
aactgtcccacagaccttcagatcc

SEQ ID NO: 1133 - DNA, 25 bp, Homo sapiens
actgtcccacagaccttcagatcct

SEQ ID NO: 1134 - DNA, 25 bp, Homo sapiens
ctgtcccacagaccttcagatcctg

SEQ ID NO: 1135 - DNA, 25 bp, Homo sapiens
tgtcccacagaccttcagatcctgg

SEQ ID NO: 1136 - DNA, 25 bp, Homo sapiens
gtcccacagaccttcagatcctgga

SEQ ID NO: 1137 - DNA, 25 bp, Homo sapiens
tcccacagaccttcagatcctggaa

SEQ ID NO: 1138 - DNA, 25 bp, Homo sapiens
cccacagaccttcagatcctggaaa

SEQ ID NO: 1139 - DNA, 25 bp, Homo sapiens
ccacagaccttcagatcctggaaag

SEQ ID NO: 1140 - DNA, 25 bp, Homo sapiens
cacagaccttcagatcctggaaaga

SEQ ID NO: 1141 - DNA, 25 bp, Homo sapiens
acagaccttcagatcctggaaagag

SEQ ID NO: 1142 - DNA, 25 bp, Homo sapiens
cagaccttcagatcctggaaagagc

SEQ ID NO: 1143 - DNA, 25 bp, Homo sapiens
agaccttcagatcctggaaagagca

SEQ ID NO: 1144 - DNA, 25 bp, Homo sapiens
gaccttcagatcctggaaagagcaa

SEQ ID NO: 1145 - DNA, 25 bp, Homo sapiens
accttcagatcctggaaagagcaag

SEQ ID NO: 1146 - DNA, 25 bp, Homo sapiens
ccttcagatcctggaaagagcaagg

SEQ ID NO: 1147 - DNA, 25 bp, Homo sapiens
cttcagatcctggaaagagcaaggg

SEQ ID NO: 1148 - DNA, 25 bp, Homo sapiens
ttcagatcctggaaagagcaagggg

SEQ ID NO: 1149 - DNA, 25 bp, Homo sapiens
tcagatcctggaaagagcaagggga

SEQ ID NO: 1150 - DNA, 25 bp, Homo sapiens
cagatcctggaaagagcaaggggac

SEQ ID NO: 1151 - DNA, 25 bp, Homo sapiens
agatcctggaaagagcaaggggacc

SEQ ID NO: 1152 - DNA, 25 bp, Homo sapiens
gatcctggaaagagcaaggggacct

SEQ ID NO: 1153 - DNA, 25 bp, Homo sapiens
atcctggaaagagcaaggggacctc

SEQ ID NO: 1154 - DNA, 25 bp, Homo sapiens
tcctggaaagagcaaggggacctcc

SEQ ID NO: 1155 - DNA, 25 bp, Homo sapiens
cctggaaagagcaaggggacctccc

SEQ ID NO: 1156 - DNA, 25 bp, Homo sapiens
ctggaaagagcaaggggacctccca

SEQ ID NO: 1157 - DNA, 25 bp, Homo sapiens
tggaaagagcaaggggacctcccat

SEQ ID NO: 1158 - DNA, 25 bp, Homo sapiens
ggaaagagcaaggggacctcccata

SEQ ID NO: 1159 - DNA, 25 bp, Homo sapiens
gaaagagcaaggggacctcccataa

SEQ ID NO: 1160 - DNA, 25 bp, Homo sapiens
aaagagcaaggggacctcccataaa

SEQ ID NO: 1161 - DNA, 25 bp, Homo sapiens
aagagcaaggggacctcccataaac

SEQ ID NO: 1162 - DNA, 25 bp, Homo sapiens
agagcaaggggacctcccataaacg

SEQ ID NO: 1163 - DNA, 25 bp, Homo sapiens
gagcaaggggacctcccataaacgg

SEQ ID NO: 1164 - DNA, 25 bp, Homo sapiens
agcaaggggacctcccataaacgga

SEQ ID NO: 1165 - DNA, 25 bp, Homo sapiens
gcaaggggacctcccataaacggaa

SEQ ID NO: 1166 - DNA, 25 bp, Homo sapiens
caaggggacctcccataaacggaag

SEQ ID NO: 1167 - DNA, 25 bp, Homo sapiens
aaggggacctcccataaacggaagc

SEQ ID NO: 1168 - DNA, 25 bp, Homo sapiens
aggggacctcccataaacggaagcg

SEQ ID NO: 1169 - DNA, 25 bp, Homo sapiens
ggggacctcccataaacggaagcga

SEQ ID NO: 1170 - DNA, 25 bp, Homo sapiens
gggacctcccataaacggaagcgaa

SEQ ID NO: 1171 - DNA, 25 bp, Homo sapiens
ggacctcccataaacggaagcgaat

SEQ ID NO: 1172 - DNA, 25 bp, Homo sapiens
gacctcccataaacggaagcgaatt

SEQ ID NO: 1173 - DNA, 25 bp, Homo sapiens
acctcccataaacggaagcgaatta

SEQ ID NO: 1174 - DNA, 25 bp, Homo sapiens
cctcccataaacggaagcgaattaa

SEQ ID NO: 1175 - DNA, 25 bp, Homo sapiens
ctcccataaacggaagcgaattaac

SEQ ID NO: 1176 - DNA, 25 bp, Homo sapiens
tcccataaacggaagcgaattaacc

SEQ ID NO: 1177 - DNA, 25 bp, Homo sapiens
cccataaacggaagcgaattaaccc

SEQ ID NO: 1178 - DNA, 25 bp, Homo sapiens
ccataaacggaagcgaattaaccct

SEQ ID NO: 1179 - DNA, 25 bp, Homo sapiens
cataaacggaagcgaattaaccctc

SEQ ID NO: 1180 - DNA, 25 bp, Homo sapiens
ataaacggaagcgaattaaccctcc

SEQ ID NO: 1181 - DNA, 25 bp, Homo sapiens
taaacggaagcgaattaaccctccc

SEQ ID NO: 1182 - DNA, 25 bp, Homo sapiens
aaacggaagcgaattaaccctcccc

SEQ ID NO: 1183 - DNA, 25 bp, Homo sapiens
aacggaagcgaattaaccctcccct

SEQ ID NO: 1184 - DNA, 25 bp, Homo sapiens
acggaagcgaattaaccctcccctg

SEQ ID NO: 1185 - DNA, 25 bp, Homo sapiens
cggaagcgaattaaccctcccctgg

SEQ ID NO: 1186 - DNA, 25 bp, Homo sapiens
ggaagcgaattaaccctcccctggc

SEQ ID NO: 1187 - DNA, 25 bp, Homo sapiens
gaagcgaattaaccctcccctggcc

SEQ ID NO: 1188 - DNA, 25 bp, Homo sapiens
aagcgaattaaccctcccctggcca

SEQ ID NO: 1189 - DNA, 25 bp, Homo sapiens
agcgaattaaccctcccctggccaa

SEQ ID NO: 1190 - DNA, 25 bp, Homo sapiens
gcgaattaaccctcccctggccaag

SEQ ID NO: 1191 - DNA, 25 bp, Homo sapiens
cgaattaaccctcccctggccaagc

SEQ ID NO: 1192 - DNA, 25 bp, Homo sapiens
gaattaaccctcccctggccaagcc

SEQ ID NO: 1193 - DNA, 25 bp, Homo sapiens
aattaaccctcccctggccaagcca

SEQ ID NO: 1194 - DNA, 25 bp, Homo sapiens
attaaccctcccctggccaagccaa

SEQ ID NO: 1195 - DNA, 25 bp, Homo sapiens
ttaaccctcccctggccaagccaaa

SEQ ID NO: 1196 - DNA, 25 bp, Homo sapiens
taaccctcccctggccaagccaaaa

SEQ ID NO: 1197 - DNA, 25 bp, Homo sapiens
aaccctcccctggccaagccaaaaa

SEQ ID NO: 1198 - DNA, 25 bp, Homo sapiens
accctcccctggccaagccaaaaaa

SEQ ID NO: 1199 - DNA, 25 bp, Homo sapiens
ccctcccctggccaagccaaaaaaa

SEQ ID NO: 1200 - DNA, 25 bp, Homo sapiens
cctcccctggccaagccaaaaaaag

SEQ ID NO: 1201 - DNA, 25 bp, Homo sapiens
ctcccctggccaagccaaaaaaagg

SEQ ID NO: 1202 - DNA, 25 bp, Homo sapiens
tcccctggccaagccaaaaaaaggg

SEQ ID NO: 1203 - DNA, 25 bp, Homo sapiens
cccctggccaagccaaaaaaagggt

SEQ ID NO: 1204 - DNA, 25 bp, Homo sapiens
ccctggccaagccaaaaaaagggta

SEQ ID NO: 1205 - DNA, 25 bp, Homo sapiens
cctggccaagccaaaaaaagggtat

SEQ ID NO: 1206 - DNA, 25 bp, Homo sapiens
ctggccaagccaaaaaaagggtatt

SEQ ID NO: 1207 - DNA, 25 bp, Homo sapiens
tggccaagccaaaaaaagggtattc

SEQ ID NO: 1208 - DNA, 25 bp, Homo sapiens
ggccaagccaaaaaaagggtattca

SEQ ID NO: 1209 - DNA, 25 bp, Homo sapiens
gccaagccaaaaaaagggtattcag

SEQ ID NO: 1210 - DNA, 25 bp, Homo sapiens
ccaagccaaaaaaagggtattcagg

SEQ ID NO: 1211 - DNA, 25 bp, Homo sapiens
caagccaaaaaaagggtattcaggc

SEQ ID NO: 1212 - DNA, 25 bp, Homo sapiens
aagccaaaaaaagggtattcaggca

SEQ ID NO: 1213 - DNA, 25 bp, Homo sapiens
agccaaaaaaagggtattcaggcaa

SEQ ID NO: 1214 - DNA, 25 bp, Homo sapiens
gccaaaaaaagggtattcaggcaag

SEQ ID NO: 1215 - DNA, 25 bp, Homo sapiens
ccaaaaaaagggtattcaggcaagc

SEQ ID NO: 1216 - DNA, 25 bp, Homo sapiens
caaaaaaagggtattcaggcaagcc

SEQ ID NO: 1217 - DNA, 25 bp, Homo sapiens
aaaaaaagggtattcaggcaagccc

SEQ ID NO: 1218 - DNA, 25 bp, Homo sapiens
aaaaaagggtattcaggcaagccct

SEQ ID NO: 1219 - DNA, 25 bp, Homo sapiens
aaaaagggtattcaggcaagccctc

SEQ ID NO: 1220 - DNA, 25 bp, Homo sapiens
aaaagggtattcaggcaagccctct

SEQ ID NO: 1221 - DNA, 25 bp, Homo sapiens
aaagggtattcaggcaagccctctt

SEQ ID NO: 1222 - DNA, 25 bp, Homo sapiens
aagggtattcaggcaagccctcttc

SEQ ID NO: 1223 - DNA, 25 bp, Homo sapiens
agggtattcaggcaagccctcttca

SEQ ID NO: 1224 - DNA, 25 bp, Homo sapiens
gggtattcaggcaagccctcttcag

SEQ ID NO: 1225 - DNA, 25 bp, Homo sapiens
ggtattcaggcaagccctcttcagg

SEQ ID NO: 1226 - DNA, 25 bp, Homo sapiens
gtattcaggcaagccctcttcagga

SEQ ID NO: 1227 - DNA, 25 bp, Homo sapiens
tattcaggcaagccctcttcaggag

SEQ ID NO: 1228 - DNA, 25 bp, Homo sapiens
attcaggcaagccctcttcaggagg

SEQ ID NO: 1229 - DNA, 25 bp, Homo sapiens
ttcaggcaagccctcttcaggaggt

SEQ ID NO: 1230 - DNA, 25 bp, Homo sapiens
tcaggcaagccctcttcaggaggtg

SEQ ID NO: 1231 - DNA, 25 bp, Homo sapiens
caggcaagccctcttcaggaggtga

SEQ ID NO: 1232 - DNA, 25 bp, Homo sapiens
aggcaagccctcttcaggaggtgac

SEQ ID NO: 1233 - DNA, 25 bp, Homo sapiens
ggcaagccctcttcaggaggtgaca

SEQ ID NO: 1234 - DNA, 25 bp, Homo sapiens
gcaagccctcttcaggaggtgacag

SEQ ID NO: 1235 - DNA, 25 bp, Homo sapiens
caagccctcttcaggaggtgacagg

SEQ ID NO: 1236 - DNA, 25 bp, Homo sapiens
aagccctcttcaggaggtgacaggg

SEQ ID NO: 1237 - DNA, 25 bp, Homo sapiens
agccctcttcaggaggtgacagggc

SEQ ID NO: 1238 - DNA, 25 bp, Homo sapiens
gccctcttcaggaggtgacagggcc

SEQ ID NO: 1239 - DNA, 25 bp, Homo sapiens
ccctcttcaggaggtgacagggcca

SEQ ID NO: 1240 - DNA, 25 bp, Homo sapiens
cctcttcaggaggtgacagggccac

SEQ ID NO: 1241 - DNA, 25 bp, Homo sapiens
ctcttcaggaggtgacagggccacc

SEQ ID NO: 1242 - DNA, 25 bp, Homo sapiens
tcttcaggaggtgacagggccacca

SEQ ID NO: 1243 - DNA, 25 bp, Homo sapiens
cttcaggaggtgacagggccaccaa

SEQ ID NO: 1244 - DNA, 25 bp, Homo sapiens
ttcaggaggtgacagggccaccaag

SEQ ID NO: 1245 - DNA, 25 bp, Homo sapiens
tcaggaggtgacagggccaccaaga

SEQ ID NO: 1246 - DNA, 25 bp, Homo sapiens
caggaggtgacagggccaccaagac

SEQ ID NO: 1247 - DNA, 25 bp, Homo sapiens
aggaggtgacagggccaccaagacg

SEQ ID NO: 1248 - DNA, 25 bp, Homo sapiens
ggaggtgacagggccaccaagacgg

SEQ ID NO: 1249 - DNA, 25 bp, Homo sapiens
gaggtgacagggccaccaagacggt

SEQ ID NO: 1250 - DNA, 25 bp, Homo sapiens
aggtgacagggccaccaagacggtg

SEQ ID NO: 1251 - DNA, 25 bp, Homo sapiens
ggtgacagggccaccaagacggtgt

SEQ ID NO: 1252 - DNA, 25 bp, Homo sapiens
gtgacagggccaccaagacggtgtc

SEQ ID NO: 1253 - DNA, 25 bp, Homo sapiens
tgacagggccaccaagacggtgtct

SEQ ID NO: 1254 - DNA, 25 bp, Homo sapiens
gacagggccaccaagacggtgtctt

SEQ ID NO: 1255 - DNA, 25 bp, Homo sapiens
acagggccaccaagacggtgtctta

SEQ ID NO: 1256 - DNA, 25 bp, Homo sapiens
cagggccaccaagacggtgtcttac

SEQ ID NO: 1257 - DNA, 25 bp, Homo sapiens
agggccaccaagacggtgtcttaca

SEQ ID NO: 1258 - DNA, 25 bp, Homo sapiens
gggccaccaagacggtgtcttacag

SEQ ID NO: 1259 - DNA, 25 bp, Homo sapiens
ggccaccaagacggtgtcttacagg

SEQ ID NO: 1260 - DNA, 25 bp, Homo sapiens
gccaccaagacggtgtcttacagga

SEQ ID NO: 1261 - DNA, 25 bp, Homo sapiens
ccaccaagacggtgtcttacaggac

SEQ ID NO: 1262 - DNA, 25 bp, Homo sapiens
caccaagacggtgtcttacaggact

SEQ ID NO: 1263 - DNA, 25 bp, Homo sapiens
accaagacggtgtcttacaggacta

SEQ ID NO: 1264 - DNA, 25 bp, Homo sapiens
ccaagacggtgtcttacaggactac

SEQ ID NO: 1265 - DNA, 25 bp, Homo sapiens
caagacggtgtcttacaggactacc

SEQ ID NO: 1266 - DNA, 25 bp, Homo sapiens
aagacggtgtcttacaggactaccc

SEQ ID NO: 1267 - DNA, 25 bp, Homo sapiens
agacggtgtcttacaggactacccc

SEQ ID NO: 1268 - DNA, 25 bp, Homo sapiens
gacggtgtcttacaggactaccccc

SEQ ID NO: 1269 - DNA, 25 bp, Homo sapiens
acggtgtcttacaggactaccccca

SEQ ID NO: 1270 - DNA, 25 bp, Homo sapiens
cggtgtcttacaggactacccccag

SEQ ID NO: 1271 - DNA, 25 bp, Homo sapiens
ggtgtcttacaggactacccccagt

SEQ ID NO: 1272 - DNA, 25 bp, Homo sapiens
gtgtcttacaggactacccccagtg

SEQ ID NO: 1273 - DNA, 25 bp, Homo sapiens
tgtcttacaggactacccccagtgg

SEQ ID NO: 1274 - DNA, 25 bp, Homo sapiens
gtcttacaggactacccccagtggt

SEQ ID NO: 1275 - DNA, 25 bp, Homo sapiens
tcttacaggactacccccagtggtt

SEQ ID NO: 1276 - DNA, 25 bp, Homo sapiens
cttacaggactacccccagtggttt

SEQ ID NO: 1277 - DNA, 25 bp, Homo sapiens
ttacaggactacccccagtggtttg

SEQ ID NO: 1278 - DNA, 25 bp, Homo sapiens
tacaggactacccccagtggtttgc

SEQ ID NO: 1279 - DNA, 25 bp, Homo sapiens
acaggactacccccagtggtttgca

SEQ ID NO: 1280 - DNA, 25 bp, Homo sapiens
caggactacccccagtggtttgcaa

SEQ ID NO: 1281 - DNA, 25 bp, Homo sapiens
aggactacccccagtggtttgcaaa

SEQ ID NO: 1282 - DNA, 25 bp, Homo sapiens
ggactacccccagtggtttgcaaat

SEQ ID NO: 1283 - DNA, 25 bp, Homo sapiens
gactacccccagtggtttgcaaata

SEQ ID NO: 1284 - DNA, 25 bp, Homo sapiens
actacccccagtggtttgcaaataa

SEQ ID NO: 1285 - DNA, 25 bp, Homo sapiens
ctacccccagtggtttgcaaataat

SEQ ID NO: 1286 - DNA, 25 bp, Homo sapiens
tacccccagtggtttgcaaataatg

SEQ ID NO: 1287 - DNA, 25 bp, Homo sapiens
acccccagtggtttgcaaataatgc

SEQ ID NO: 1288 - DNA, 25 bp, Homo sapiens
cccccagtggtttgcaaataatgcc

SEQ ID NO: 1289 - DNA, 25 bp, Homo sapiens
ccccagtggtttgcaaataatgccc

SEQ ID NO: 1290 - DNA, 25 bp, Homo sapiens
cccagtggtttgcaaataatgcccc

SEQ ID NO: 1291 - DNA, 25 bp, Homo sapiens
ccagtggtttgcaaataatgcccct

SEQ ID NO: 1292 - DNA, 25 bp, Homo sapiens
cagtggtttgcaaataatgcccctg

SEQ ID NO: 1293 - DNA, 25 bp, Homo sapiens
agtggtttgcaaataatgcccctga

SEQ ID NO: 1294 - DNA, 25 bp, Homo sapiens
gtggtttgcaaataatgcccctgaa

SEQ ID NO: 1295 - DNA, 25 bp, Homo sapiens
tggtttgcaaataatgcccctgaaa

SEQ ID NO: 1296 - DNA, 25 bp, Homo sapiens
ggtttgcaaataatgcccctgaaaa

SEQ ID NO: 1297 - DNA, 25 bp, Homo sapiens
gtttgcaaataatgcccctgaaaaa

SEQ ID NO: 1298 - DNA, 25 bp, Homo sapiens
tttgcaaataatgcccctgaaaaag

SEQ ID NO: 1299 - DNA, 25 bp, Homo sapiens
ttgcaaataatgcccctgaaaaagt

SEQ ID NO: 1300 - DNA, 25 bp, Homo sapiens
tgcaaataatgcccctgaaaaagtc

SEQ ID NO: 1301 - DNA, 25 bp, Homo sapiens
gcaaataatgcccctgaaaaagtct

SEQ ID NO: 1302 - DNA, 25 bp, Homo sapiens
caaataatgcccctgaaaaagtctc

SEQ ID NO: 1303 - DNA, 25 bp, Homo sapiens
aaataatgcccctgaaaaagtctca

SEQ ID NO: 1304 - DNA, 25 bp, Homo sapiens
aataatgcccctgaaaaagtctcag

SEQ ID NO: 1305 - DNA, 25 bp, Homo sapiens
ataatgcccctgaaaaagtctcaga

SEQ ID NO: 1306 - DNA, 25 bp, Homo sapiens
taatgcccctgaaaaagtctcagaa

SEQ ID NO: 1307 - DNA, 25 bp, Homo sapiens
aatgcccctgaaaaagtctcagaac

SEQ ID NO: 1308 - DNA, 25 bp, Homo sapiens
atgcccctgaaaaagtctcagaacg

SEQ ID NO: 1309 - DNA, 25 bp, Homo sapiens
tgcccctgaaaaagtctcagaacgg

SEQ ID NO: 1310 - DNA, 25 bp, Homo sapiens
gcccctgaaaaagtctcagaacggg

SEQ ID NO: 1311 - DNA, 25 bp, Homo sapiens
cccctgaaaaagtctcagaacggga

SEQ ID NO: 1312 - DNA, 25 bp, Homo sapiens
ccctgaaaaagtctcagaacgggat

SEQ ID NO: 1313 - DNA, 25 bp, Homo sapiens
cctgaaaaagtctcagaacgggatg

SEQ ID NO: 1314 - DNA, 25 bp, Homo sapiens
ctgaaaaagtctcagaacgggatgg

SEQ ID NO: 1315 - DNA, 25 bp, Homo sapiens
tgaaaaagtctcagaacgggatgga

SEQ ID NO: 1316 - DNA, 25 bp, Homo sapiens
gaaaaagtctcagaacgggatggaa

SEQ ID NO: 1317 - DNA, 25 bp, Homo sapiens
aaaaagtctcagaacgggatggaaa

SEQ ID NO: 1318 - DNA, 25 bp, Homo sapiens
aaaagtctcagaacgggatggaaaa

SEQ ID NO: 1319 - DNA, 25 bp, Homo sapiens
aaagtctcagaacgggatggaaaat

SEQ ID NO: 1320 - DNA, 25 bp, Homo sapiens
aagtctcagaacgggatggaaaatg

SEQ ID NO: 1321 - DNA, 25 bp, Homo sapiens
agtctcagaacgggatggaaaatgg

SEQ ID NO: 1322 - DNA, 25 bp, Homo sapiens
gtctcagaacgggatggaaaatggg

SEQ ID NO: 1323 - DNA, 25 bp, Homo sapiens
tctcagaacgggatggaaaatgggg

SEQ ID NO: 1324 - DNA, 25 bp, Homo sapiens
ctcagaacgggatggaaaatgggga

SEQ ID NO: 1325 - DNA, 25 bp, Homo sapiens
tcagaacgggatggaaaatggggac

SEQ ID NO: 1326 - DNA, 25 bp, Homo sapiens
cagaacgggatggaaaatggggacg

SEQ ID NO: 1327 - DNA, 25 bp, Homo sapiens
agaacgggatggaaaatggggacgc

SEQ ID NO: 1328 - DNA, 25 bp, Homo sapiens
gaacgggatggaaaatggggacgcc

SEQ ID NO: 1329 - DNA, 25 bp, Homo sapiens
aacgggatggaaaatggggacgccg

SEQ ID NO: 1330 - DNA, 25 bp, Homo sapiens
acgggatggaaaatggggacgccgg

SEQ ID NO: 1331 - DNA, 25 bp, Homo sapiens
cgggatggaaaatggggacgccggc

SEQ ID NO: 1332 - DNA, 25 bp, Homo sapiens
gggatggaaaatggggacgccggct

SEQ ID NO: 1333 - DNA, 25 bp, Homo sapiens
ggatggaaaatggggacgccggctc

SEQ ID NO: 1334 - DNA, 25 bp, Homo sapiens
gatggaaaatggggacgccggctct

SEQ ID NO: 1335 - DNA, 25 bp, Homo sapiens
atggaaaatggggacgccggctctg

SEQ ID NO: 1336 - DNA, 25 bp, Homo sapiens
tggaaaatggggacgccggctctga

SEQ ID NO: 1337 - DNA, 25 bp, Homo sapiens
ggaaaatggggacgccggctctgag

SEQ ID NO: 1338 - DNA, 25 bp, Homo sapiens
gaaaatggggacgccggctctgaga

SEQ ID NO: 1339 - DNA, 25 bp, Homo sapiens
aaaatggggacgccggctctgagaa

SEQ ID NO: 1340 - DNA, 25 bp, Homo sapiens
aaatggggacgccggctctgagaag

SEQ ID NO: 1341 - DNA, 25 bp, Homo sapiens
aatggggacgccggctctgagaagg

SEQ ID NO: 1342 - DNA, 25 bp, Homo sapiens
atggggacgccggctctgagaagga

SEQ ID NO: 1343 - DNA, 25 bp, Homo sapiens
tggggacgccggctctgagaaggat

SEQ ID NO: 1344 - DNA, 25 bp, Homo sapiens
ggggacgccggctctgagaaggatg

SEQ ID NO: 1345 - DNA, 25 bp, Homo sapiens
gggacgccggctctgagaaggatga

SEQ ID NO: 1346 - DNA, 25 bp, Homo sapiens
ggacgccggctctgagaaggatgag

SEQ ID NO: 1347 - DNA, 25 bp, Homo sapiens
gacgccggctctgagaaggatgaga

SEQ ID NO: 1348 - DNA, 25 bp, Homo sapiens
acgccggctctgagaaggatgagag

SEQ ID NO: 1349 - DNA, 25 bp, Homo sapiens
cgccggctctgagaaggatgagagg

SEQ ID NO: 1350 - DNA, 25 bp, Homo sapiens
gccggctctgagaaggatgagaggc

SEQ ID NO: 1351 - DNA, 25 bp, Homo sapiens
ccggctctgagaaggatgagaggca

SEQ ID NO: 1352 - DNA, 25 bp, Homo sapiens
cggctctgagaaggatgagaggcac

SEQ ID NO: 1353 - DNA, 25 bp, Homo sapiens
ggctctgagaaggatgagaggcact

SEQ ID NO: 1354 - DNA, 25 bp, Homo sapiens
gctctgagaaggatgagaggcactt

SEQ ID NO: 1355 - DNA, 25 bp, Homo sapiens
ctctgagaaggatgagaggcacttt

SEQ ID NO: 1356 - DNA, 25 bp, Homo sapiens
tctgagaaggatgagaggcactttg

SEQ ID NO: 1357 - DNA, 25 bp, Homo sapiens
ctgagaaggatgagaggcactttgg

SEQ ID NO: 1358 - DNA, 25 bp, Homo sapiens
tgagaaggatgagaggcactttgga

SEQ ID NO: 1359 - DNA, 25 bp, Homo sapiens
gagaaggatgagaggcactttggaa

SEQ ID NO: 1360 - DNA, 25 bp, Homo sapiens
agaaggatgagaggcactttggaaa

SEQ ID NO: 1361 - DNA, 25 bp, Homo sapiens
gaaggatgagaggcactttggaaat

SEQ ID NO: 1362 - DNA, 25 bp, Homo sapiens
aaggatgagaggcactttggaaatg

SEQ ID NO: 1363 - DNA, 25 bp, Homo sapiens
aggatgagaggcactttggaaatgg

SEQ ID NO: 1364 - DNA, 25 bp, Homo sapiens
ggatgagaggcactttggaaatggg

SEQ ID NO: 1365 - DNA, 25 bp, Homo sapiens
gatgagaggcactttggaaatgggt

SEQ ID NO: 1366 - DNA, 25 bp, Homo sapiens
atgagaggcactttggaaatgggtc

SEQ ID NO: 1367 - DNA, 25 bp, Homo sapiens
tgagaggcactttggaaatgggtcc

SEQ ID NO: 1368 - DNA, 25 bp, Homo sapiens
gagaggcactttggaaatgggtccc

SEQ ID NO: 1369 - DNA, 25 bp, Homo sapiens
agaggcactttggaaatgggtccca

SEQ ID NO: 1370 - DNA, 25 bp, Homo sapiens
gaggcactttggaaatgggtcccat

SEQ ID NO: 1371 - DNA, 25 bp, Homo sapiens
aggcactttggaaatgggtcccatc

SEQ ID NO: 1372 - DNA, 25 bp, Homo sapiens
ggcactttggaaatgggtcccatca

SEQ ID NO: 1373 - DNA, 25 bp, Homo sapiens
gcactttggaaatgggtcccatcag

SEQ ID NO: 1374 - DNA, 25 bp, Homo sapiens
cactttggaaatgggtcccatcagc

SEQ ID NO: 1375 - DNA, 25 bp, Homo sapiens
actttggaaatgggtcccatcagcc

SEQ ID NO: 1376 - DNA, 25 bp, Homo sapiens
ctttggaaatgggtcccatcagcct

SEQ ID NO: 1377 - DNA, 25 bp, Homo sapiens
tttggaaatgggtcccatcagcctg

SEQ ID NO: 1378 - DNA, 25 bp, Homo sapiens
ttggaaatgggtcccatcagcctgg

SEQ ID NO: 1379 - DNA, 25 bp, Homo sapiens
tggaaatgggtcccatcagcctggc

SEQ ID NO: 1380 - DNA, 25 bp, Homo sapiens
ggaaatgggtcccatcagcctggct

SEQ ID NO: 1381 - DNA, 25 bp, Homo sapiens
gaaatgggtcccatcagcctggctt

SEQ ID NO: 1382 - DNA, 25 bp, Homo sapiens
aaatgggtcccatcagcctggcttg

SEQ ID NO: 1383 - DNA, 25 bp, Homo sapiens
aatgggtcccatcagcctggcttgg

SEQ ID NO: 1384 - DNA, 25 bp, Homo sapiens
atgggtcccatcagcctggcttgga

SEQ ID NO: 1385 - DNA, 25 bp, Homo sapiens
tgggtcccatcagcctggcttggat

SEQ ID NO: 1386 - DNA, 25 bp, Homo sapiens
gggtcccatcagcctggcttggatt

SEQ ID NO: 1387 - DNA, 25 bp, Homo sapiens
ggtcccatcagcctggcttggattt

SEQ ID NO: 1388 - DNA, 25 bp, Homo sapiens
gtcccatcagcctggcttggatttg

SEQ ID NO: 1389 - DNA, 25 bp, Homo sapiens
tcccatcagcctggcttggatttga

SEQ ID NO: 1390 - DNA, 25 bp, Homo sapiens
cccatcagcctggcttggatttgaa

SEQ ID NO: 1391 - DNA, 25 bp, Homo sapiens
ccatcagcctggcttggatttgaat

SEQ ID NO: 1392 - DNA, 25 bp, Homo sapiens
catcagcctggcttggatttgaatg

SEQ ID NO: 1393 - DNA, 25 bp, Homo sapiens
atcagcctggcttggatttgaatga

SEQ ID NO: 1394 - DNA, 25 bp, Homo sapiens
tcagcctggcttggatttgaatgat

SEQ ID NO: 1395 - DNA, 25 bp, Homo sapiens
cagcctggcttggatttgaatgatc

SEQ ID NO: 1396 - DNA, 25 bp, Homo sapiens
agcctggcttggatttgaatgatca

SEQ ID NO: 1397 - DNA, 25 bp, Homo sapiens
gcctggcttggatttgaatgatcat

SEQ ID NO: 1398 - DNA, 25 bp, Homo sapiens
cctggcttggatttgaatgatcatg

SEQ ID NO: 1399 - DNA, 25 bp, Homo sapiens
ctggcttggatttgaatgatcatgt

SEQ ID NO: 1400 - DNA, 25 bp, Homo sapiens
tggcttggatttgaatgatcatgtt

SEQ ID NO: 1401 - DNA, 25 bp, Homo sapiens
ggcttggatttgaatgatcatgttg

SEQ ID NO: 1402 - DNA, 25 bp, Homo sapiens
gcttggatttgaatgatcatgttgg

SEQ ID NO: 1403 - DNA, 25 bp, Homo sapiens
cttggatttgaatgatcatgttgga

SEQ ID NO: 1404 - DNA, 25 bp, Homo sapiens
ttggatttgaatgatcatgttggag

SEQ ID NO: 1405 - DNA, 25 bp, Homo sapiens
tggatttgaatgatcatgttggaga

SEQ ID NO: 1406 - DNA, 25 bp, Homo sapiens
ggatttgaatgatcatgttggagag

SEQ ID NO: 1407 - DNA, 25 bp, Homo sapiens
gatttgaatgatcatgttggagagc

SEQ ID NO: 1408 - DNA, 25 bp, Homo sapiens
atttgaatgatcatgttggagagca

SEQ ID NO: 1409 - DNA, 25 bp, Homo sapiens
tttgaatgatcatgttggagagcaa

SEQ ID NO: 1410 - DNA, 25 bp, Homo sapiens
ttgaatgatcatgttggagagcaag

SEQ ID NO: 1411 - DNA, 25 bp, Homo sapiens
tgaatgatcatgttggagagcaaga

SEQ ID NO: 1412 - DNA, 25 bp, Homo sapiens
gaatgatcatgttggagagcaagat

SEQ ID NO: 1413 - DNA, 25 bp, Homo sapiens
aatgatcatgttggagagcaagata

SEQ ID NO: 1414 - DNA, 25 bp, Homo sapiens
atgatcatgttggagagcaagatat

SEQ ID NO: 1415 - DNA, 25 bp, Homo sapiens
tgatcatgttggagagcaagatatg

SEQ ID NO: 1416 - DNA, 25 bp, Homo sapiens
gatcatgttggagagcaagatatgg

SEQ ID NO: 1417 - DNA, 25 bp, Homo sapiens
atcatgttggagagcaagatatggg

SEQ ID NO: 1418 - DNA, 25 bp, Homo sapiens
tcatgttggagagcaagatatgggt

SEQ ID NO: 1419 - DNA, 25 bp, Homo sapiens
catgttggagagcaagatatgggtg

SEQ ID NO: 1420 - DNA, 25 bp, Homo sapiens
atgttggagagcaagatatgggtga

SEQ ID NO: 1421 - DNA, 25 bp, Homo sapiens
tgttggagagcaagatatgggtgaa

SEQ ID NO: 1422 - DNA, 25 bp, Homo sapiens
gttggagagcaagatatgggtgaat

SEQ ID NO: 1423 - DNA, 25 bp, Homo sapiens
ttggagagcaagatatgggtgaatg

SEQ ID NO: 1424 - DNA, 25 bp, Homo sapiens
tggagagcaagatatgggtgaatgt

SEQ ID NO: 1425 - DNA, 25 bp, Homo sapiens
ggagagcaagatatgggtgaatgtg

SEQ ID NO: 1426 - DNA, 25 bp, Homo sapiens
gagagcaagatatgggtgaatgtga

SEQ ID NO: 1427 - DNA, 25 bp, Homo sapiens
agagcaagatatgggtgaatgtgac

SEQ ID NO: 1428 - DNA, 25 bp, Homo sapiens
gagcaagatatgggtgaatgtgacg

SEQ ID NO: 1429 - DNA, 25 bp, Homo sapiens
agcaagatatgggtgaatgtgacgt

SEQ ID NO: 1430 - DNA, 25 bp, Homo sapiens
gcaagatatgggtgaatgtgacgtg

SEQ ID NO: 1431 - DNA, 25 bp, Homo sapiens
caagatatgggtgaatgtgacgtga

SEQ ID NO: 1432 - DNA, 25 bp, Homo sapiens
aagatatgggtgaatgtgacgtgaa

SEQ ID NO: 1433 - DNA, 25 bp, Homo sapiens
agatatgggtgaatgtgacgtgaat

SEQ ID NO: 1434 - DNA, 25 bp, Homo sapiens
gatatgggtgaatgtgacgtgaatc

SEQ ID NO: 1435 - DNA, 25 bp, Homo sapiens
atatgggtgaatgtgacgtgaatca

SEQ ID NO: 1436 - DNA, 25 bp, Homo sapiens
tatgggtgaatgtgacgtgaatcac

SEQ ID NO: 1437 - DNA, 25 bp, Homo sapiens
atgggtgaatgtgacgtgaatcacg

SEQ ID NO: 1438 - DNA, 25 bp, Homo sapiens
tgggtgaatgtgacgtgaatcacgc

SEQ ID NO: 1439 - DNA, 25 bp, Homo sapiens
gggtgaatgtgacgtgaatcacgct

SEQ ID NO: 1440 - DNA, 25 bp, Homo sapiens
ggtgaatgtgacgtgaatcacgcta

SEQ ID NO: 1441 - DNA, 25 bp, Homo sapiens
gtgaatgtgacgtgaatcacgctac

SEQ ID NO: 1442 - DNA, 25 bp, Homo sapiens
tgaatgtgacgtgaatcacgctaca

SEQ ID NO: 1443 - DNA, 25 bp, Homo sapiens
gaatgtgacgtgaatcacgctacac

SEQ ID NO: 1444 - DNA, 25 bp, Homo sapiens
aatgtgacgtgaatcacgctacact

SEQ ID NO: 1445 - DNA, 25 bp, Homo sapiens
atgtgacgtgaatcacgctacactg

SEQ ID NO: 1446 - DNA, 25 bp, Homo sapiens
tgtgacgtgaatcacgctacactgg

SEQ ID NO: 1447 - DNA, 25 bp, Homo sapiens
gtgacgtgaatcacgctacactggc

SEQ ID NO: 1448 - DNA, 25 bp, Homo sapiens
tgacgtgaatcacgctacactggcg

SEQ ID NO: 1449 - DNA, 25 bp, Homo sapiens
gacgtgaatcacgctacactggcgg

SEQ ID NO: 1450 - DNA, 25 bp, Homo sapiens
acgtgaatcacgctacactggcgga

SEQ ID NO: 1451 - DNA, 25 bp, Homo sapiens
cgtgaatcacgctacactggcggag

SEQ ID NO: 1452 - DNA, 25 bp, Homo sapiens
gtgaatcacgctacactggcggaga

SEQ ID NO: 1453 - DNA, 25 bp, Homo sapiens
tgaatcacgctacactggcggagaa

SEQ ID NO: 1454 - DNA, 25 bp, Homo sapiens
gaatcacgctacactggcggagaac

SEQ ID NO: 1455 - DNA, 25 bp, Homo sapiens
aatcacgctacactggcggagaacg

SEQ ID NO: 1456 - DNA, 25 bp, Homo sapiens
atcacgctacactggcggagaacgg

SEQ ID NO: 1457 - DNA, 25 bp, Homo sapiens
tcacgctacactggcggagaacggg

SEQ ID NO: 1458 - DNA, 25 bp, Homo sapiens
cacgctacactggcggagaacgggc

SEQ ID NO: 1459 - DNA, 25 bp, Homo sapiens
acgctacactggcggagaacgggct

SEQ ID NO: 1460 - DNA, 25 bp, Homo sapiens
cgctacactggcggagaacgggctc

SEQ ID NO: 1461 - DNA, 25 bp, Homo sapiens
gctacactggcggagaacgggctcg

SEQ ID NO: 1462 - DNA, 25 bp, Homo sapiens
ctacactggcggagaacgggctcgg

SEQ ID NO: 1463 - DNA, 25 bp, Homo sapiens
tacactggcggagaacgggctcggt

SEQ ID NO: 1464 - DNA, 25 bp, Homo sapiens
acactggcggagaacgggctcggtg

SEQ ID NO: 1465 - DNA, 25 bp, Homo sapiens
cactggcggagaacgggctcggtgg

SEQ ID NO: 1466 - DNA, 25 bp, Homo sapiens
actggcggagaacgggctcggtggc

SEQ ID NO: 1467 - DNA, 25 bp, Homo sapiens
ctggcggagaacgggctcggtggct

SEQ ID NO: 1468 - DNA, 25 bp, Homo sapiens
tggcggagaacgggctcggtggctc

SEQ ID NO: 1469 - DNA, 25 bp, Homo sapiens
ggcggagaacgggctcggtggctct

SEQ ID NO: 1470 - DNA, 25 bp, Homo sapiens
gcggagaacgggctcggtggctctg

SEQ ID NO: 1471 - DNA, 25 bp, Homo sapiens
cggagaacgggctcggtggctctgc

SEQ ID NO: 1472 - DNA, 25 bp, Homo sapiens
ggagaacgggctcggtggctctgct

SEQ ID NO: 1473 - DNA, 25 bp, Homo sapiens
gagaacgggctcggtggctctgctc

SEQ ID NO: 1474 - DNA, 25 bp, Homo sapiens
agaacgggctcggtggctctgctct

SEQ ID NO: 1475 - DNA, 25 bp, Homo sapiens
gaacgggctcggtggctctgctctg

SEQ ID NO: 1476 - DNA, 25 bp, Homo sapiens
aacgggctcggtggctctgctctga

SEQ ID NO: 1477 - DNA, 25 bp, Homo sapiens
acgggctcggtggctctgctctgac

SEQ ID NO: 1478 - DNA, 25 bp, Homo sapiens
cgggctcggtggctctgctctgacc

SEQ ID NO: 1479 - DNA, 25 bp, Homo sapiens
gggctcggtggctctgctctgacca

SEQ ID NO: 1480 - DNA, 25 bp, Homo sapiens
ggctcggtggctctgctctgaccaa

SEQ ID NO: 1481 - DNA, 25 bp, Homo sapiens
gctcggtggctctgctctgaccaac

SEQ ID NO: 1482 - DNA, 25 bp, Homo sapiens
ctcggtggctctgctctgaccaacg

SEQ ID NO: 1483 - DNA, 25 bp, Homo sapiens
tcggtggctctgctctgaccaacgg

SEQ ID NO: 1484 - DNA, 25 bp, Homo sapiens
cggtggctctgctctgaccaacggg

SEQ ID NO: 1485 - DNA, 25 bp, Homo sapiens
ggtggctctgctctgaccaacgggg

SEQ ID NO: 1486 - DNA, 25 bp, Homo sapiens
gtggctctgctctgaccaacggggg

SEQ ID NO: 1487 - DNA, 25 bp, Homo sapiens
tggctctgctctgaccaacggggga

SEQ ID NO: 1488 - DNA, 25 bp, Homo sapiens
ggctctgctctgaccaacgggggat

SEQ ID NO: 1489 - DNA, 25 bp, Homo sapiens
gctctgctctgaccaacgggggatt

SEQ ID NO: 1490 - DNA, 25 bp, Homo sapiens
ctctgctctgaccaacgggggattg

SEQ ID NO: 1491 - DNA, 25 bp, Homo sapiens
tctgctctgaccaacgggggattga

SEQ ID NO: 1492 - DNA, 25 bp, Homo sapiens
ctgctctgaccaacgggggattgaa

SEQ ID NO: 1493 - DNA, 25 bp, Homo sapiens
tgctctgaccaacgggggattgaac

SEQ ID NO: 1494 - DNA, 25 bp, Homo sapiens
gctctgaccaacgggggattgaacc

SEQ ID NO: 1495 - DNA, 25 bp, Homo sapiens
ctctgaccaacgggggattgaacct

SEQ ID NO: 1496 - DNA, 25 bp, Homo sapiens
tctgaccaacgggggattgaacctg

SEQ ID NO: 1497 - DNA, 25 bp, Homo sapiens
ctgaccaacgggggattgaacctgc

SEQ ID NO: 1498 - DNA, 25 bp, Homo sapiens
tgaccaacgggggattgaacctgca

SEQ ID NO: 1499 - DNA, 25 bp, Homo sapiens
gaccaacgggggattgaacctgcac

SEQ ID NO: 1500 - DNA, 25 bp, Homo sapiens
accaacgggggattgaacctgcaca

SEQ ID NO: 1501 - DNA, 25 bp, Homo sapiens
ccaacgggggattgaacctgcacag

SEQ ID NO: 1502 - DNA, 25 bp, Homo sapiens
caacgggggattgaacctgcacagt

SEQ ID NO: 1503 - DNA, 25 bp, Homo sapiens
aacgggggattgaacctgcacagtc

SEQ ID NO: 1504 - DNA, 25 bp, Homo sapiens
acgggggattgaacctgcacagtcc

SEQ ID NO: 1505 - DNA, 25 bp, Homo sapiens
cgggggattgaacctgcacagtcca

SEQ ID NO: 1506 - DNA, 25 bp, Homo sapiens
gggggattgaacctgcacagtccag

SEQ ID NO: 1507 - DNA, 25 bp, Homo sapiens
ggggattgaacctgcacagtccagt

SEQ ID NO: 1508 - DNA, 25 bp, Homo sapiens
gggattgaacctgcacagtccagtg

SEQ ID NO: 1509 - DNA, 25 bp, Homo sapiens
ggattgaacctgcacagtccagtga

SEQ ID NO: 1510 - DNA, 25 bp, Homo sapiens
gattgaacctgcacagtccagtgaa

SEQ ID NO: 1511 - DNA, 25 bp, Homo sapiens
attgaacctgcacagtccagtgaag

SEQ ID NO: 1512 - DNA, 25 bp, Homo sapiens
ttgaacctgcacagtccagtgaaga

SEQ ID NO: 1513 - DNA, 25 bp, Homo sapiens
tgaacctgcacagtccagtgaagag

SEQ ID NO: 1514 - DNA, 25 bp, Homo sapiens
gaacctgcacagtccagtgaagagg

SEQ ID NO: 1515 - DNA, 25 bp, Homo sapiens
aacctgcacagtccagtgaagagga

SEQ ID NO: 1516 - DNA, 25 bp, Homo sapiens
acctgcacagtccagtgaagaggaa

SEQ ID NO: 1517 - DNA, 25 bp, Homo sapiens
cctgcacagtccagtgaagaggaag

SEQ ID NO: 1518 - DNA, 25 bp, Homo sapiens
ctgcacagtccagtgaagaggaagc

SEQ ID NO: 1519 - DNA, 25 bp, Homo sapiens
tgcacagtccagtgaagaggaagct

SEQ ID NO: 1520 - DNA, 25 bp, Homo sapiens
gcacagtccagtgaagaggaagctg

SEQ ID NO: 1521 - DNA, 17 bp, Homo sapiens
atcatgaaagaagtccg

SEQ ID NO: 1522 - DNA, 17 bp, Homo sapiens
tcatgaaagaagtccgg

SEQ ID NO: 1523 - DNA, 17 bp, Homo sapiens
catgaaagaagtccggc

SEQ ID NO: 1524 - DNA, 17 bp, Homo sapiens
atgaaagaagtccggcg

SEQ ID NO: 1525 - DNA, 17 bp, Homo sapiens
tgaaagaagtccggcga

SEQ ID NO: 1526 - DNA, 17 bp, Homo sapiens
gaaagaagtccggcgag

SEQ ID NO: 1527 - DNA, 17 bp, Homo sapiens
aaagaagtccggcgagc

SEQ ID NO: 1528 - DNA, 17 bp, Homo sapiens
aagaagtccggcgagcg

SEQ ID NO: 1529 - DNA, 17 bp, Homo sapiens
agaagtccggcgagcgc

SEQ ID NO: 1530 - DNA, 17 bp, Homo sapiens
gaagtccggcgagcgct

SEQ ID NO: 1531 - DNA, 17 bp, Homo sapiens
aagtccggcgagcgctc

SEQ ID NO: 1532 - DNA, 17 bp, Homo sapiens
agtccggcgagcgctct

SEQ ID NO: 1533 - DNA, 17 bp, Homo sapiens
gtccggcgagcgctctg

SEQ ID NO: 1534 - DNA, 17 bp, Homo sapiens
tccggcgagcgctctgc

SEQ ID NO: 1535 - DNA, 17 bp, Homo sapiens
ccggcgagcgctctgca

SEQ ID NO: 1536 - DNA, 17 bp, Homo sapiens
cggcgagcgctctgcaa

SEQ ID NO: 1537 - DNA, 17 bp, Homo sapiens
ggcgagcgctctgcaac

SEQ ID NO: 1538 - DNA, 17 bp, Homo sapiens
gcgagcgctctgcaacg

SEQ ID NO: 1539 - DNA, 17 bp, Homo sapiens
cgagcgctctgcaacgc

SEQ ID NO: 1540 - DNA, 17 bp, Homo sapiens
gagcgctctgcaacgca

SEQ ID NO: 1541 - DNA, 17 bp, Homo sapiens
agcgctctgcaacgcag

SEQ ID NO: 1542 - DNA, 17 bp, Homo sapiens
gcgctctgcaacgcagc

SEQ ID NO: 1543 - DNA, 17 bp, Homo sapiens
cgctctgcaacgcagcc

SEQ ID NO: 1544 - DNA, 17 bp, Homo sapiens
gctctgcaacgcagcca

SEQ ID NO: 1545 - DNA, 17 bp, Homo sapiens
ctctgcaacgcagccac

SEQ ID NO: 1546 - DNA, 17 bp, Homo sapiens
tctgcaacgcagccaca

SEQ ID NO: 1547 - DNA, 17 bp, Homo sapiens
ctgcaacgcagccacag

SEQ ID NO: 1548 - DNA, 17 bp, Homo sapiens
tgcaacgcagccacaga

SEQ ID NO: 1549 - DNA, 17 bp, Homo sapiens
gcaacgcagccacagac

SEQ ID NO: 1550 - DNA, 17 bp, Homo sapiens
caacgcagccacagacg

SEQ ID NO: 1551 - DNA, 17 bp, Homo sapiens
aacgcagccacagacga

SEQ ID NO: 1552 - DNA, 17 bp, Homo sapiens
acgcagccacagacgac

SEQ ID NO: 1553 - DNA, 17 bp, Homo sapiens
cgcagccacagacgaca

SEQ ID NO: 1554 - DNA, 17 bp, Homo sapiens
gcagccacagacgacag

SEQ ID NO: 1555 - DNA, 17 bp, Homo sapiens
cagccacagacgacagc

SEQ ID NO: 1556 - DNA, 17 bp, Homo sapiens
agccacagacgacagca

SEQ ID NO: 1557 - DNA, 17 bp, Homo sapiens
gccacagacgacagcaa

SEQ ID NO: 1558 - DNA, 17 bp, Homo sapiens
ccacagacgacagcaaa

SEQ ID NO: 1559 - DNA, 17 bp, Homo sapiens
cacagacgacagcaaac

SEQ ID NO: 1560 - DNA, 17 bp, Homo sapiens
acagacgacagcaaact

SEQ ID NO: 1561 - DNA, 17 bp, Homo sapiens
cagacgacagcaaactg

SEQ ID NO: 1562 - DNA, 17 bp, Homo sapiens
agacgacagcaaactgc

SEQ ID NO: 1563 - DNA, 17 bp, Homo sapiens
gacgacagcaaactgct

SEQ ID NO: 1564 - DNA, 17 bp, Homo sapiens
acgacagcaaactgctg

SEQ ID NO: 1565 - DNA, 17 bp, Homo sapiens
cgacagcaaactgctgc

SEQ ID NO: 1566 - DNA, 17 bp, Homo sapiens
gacagcaaactgctgct

SEQ ID NO: 1567 - DNA, 17 bp, Homo sapiens
acagcaaactgctgctc

SEQ ID NO: 1568 - DNA, 17 bp, Homo sapiens
cagcaaactgctgctcc

SEQ ID NO: 1569 - DNA, 17 bp, Homo sapiens
agcaaactgctgctcct

SEQ ID NO: 1570 - DNA, 17 bp, Homo sapiens
gcaaactgctgctcctc

SEQ ID NO: 1571 - DNA, 17 bp, Homo sapiens
caaactgctgctcctca

SEQ ID NO: 1572 - DNA, 17 bp, Homo sapiens
aaactgctgctcctcag

SEQ ID NO: 1573 - DNA, 17 bp, Homo sapiens
aactgctgctcctcagc

SEQ ID NO: 1574 - DNA, 17 bp, Homo sapiens
actgctgctcctcagcg

SEQ ID NO: 1575 - DNA, 17 bp, Homo sapiens
ctgctgctcctcagcgc

SEQ ID NO: 1576 - DNA, 17 bp, Homo sapiens
tgctgctcctcagcgca

SEQ ID NO: 1577 - DNA, 17 bp, Homo sapiens
gctgctcctcagcgcag

SEQ ID NO: 1578 - DNA, 17 bp, Homo sapiens
ctgctcctcagcgcagt

SEQ ID NO: 1579 - DNA, 17 bp, Homo sapiens
tgctcctcagcgcagtg

SEQ ID NO: 1580 - DNA, 17 bp, Homo sapiens
gctcctcagcgcagtgg

SEQ ID NO: 1581 - DNA, 17 bp, Homo sapiens
ctcctcagcgcagtggg

SEQ ID NO: 1582 - DNA, 17 bp, Homo sapiens
tcctcagcgcagtgggg

SEQ ID NO: 1583 - DNA, 17 bp, Homo sapiens
cctcagcgcagtgggga

SEQ ID NO: 1584 - DNA, 17 bp, Homo sapiens
ctcagcgcagtggggag

SEQ ID NO: 1585 - DNA, 17 bp, Homo sapiens
tcagcgcagtggggagc

SEQ ID NO: 1586 - DNA, 17 bp, Homo sapiens
cagcgcagtggggagcg

SEQ ID NO: 1587 - DNA, 17 bp, Homo sapiens
agcgcagtggggagcgt

SEQ ID NO: 1588 - DNA, 17 bp, Homo sapiens
gcgcagtggggagcgtg

SEQ ID NO: 1589 - DNA, 17 bp, Homo sapiens
cgcagtggggagcgtgt

SEQ ID NO: 1590 - DNA, 17 bp, Homo sapiens
gcagtggggagcgtgtt

SEQ ID NO: 1591 - DNA, 17 bp, Homo sapiens
cagtggggagcgtgttc

SEQ ID NO: 1592 - DNA, 17 bp, Homo sapiens
agtggggagcgtgttct

SEQ ID NO: 1593 - DNA, 17 bp, Homo sapiens
gtggggagcgtgttctg

SEQ ID NO: 1594 - DNA, 17 bp, Homo sapiens
tggggagcgtgttctgc

SEQ ID NO: 1595 - DNA, 17 bp, Homo sapiens
ggggagcgtgttctgca

SEQ ID NO: 1596 - DNA, 17 bp, Homo sapiens
gggagcgtgttctgcag

SEQ ID NO: 1597 - DNA, 17 bp, Homo sapiens
ggagcgtgttctgcagc

SEQ ID NO: 1598 - DNA, 17 bp, Homo sapiens
gagcgtgttctgcagcg

SEQ ID NO: 1599 - DNA, 17 bp, Homo sapiens
agcgtgttctgcagcgg

SEQ ID NO: 1600 - DNA, 17 bp, Homo sapiens
gcgtgttctgcagcggc

SEQ ID NO: 1601 - DNA, 17 bp, Homo sapiens
cgtgttctgcagcggcc

SEQ ID NO: 1602 - DNA, 17 bp, Homo sapiens
gtgttctgcagcggcct

SEQ ID NO: 1603 - DNA, 17 bp, Homo sapiens
tgttctgcagcggcctg

SEQ ID NO: 1604 - DNA, 17 bp, Homo sapiens
gttctgcagcggcctgg

SEQ ID NO: 1605 - DNA, 17 bp, Homo sapiens
ttctgcagcggcctgga

SEQ ID NO: 1606 - DNA, 17 bp, Homo sapiens
tctgcagcggcctggat

SEQ ID NO: 1607 - DNA, 17 bp, Homo sapiens
ctgcagcggcctggatt

SEQ ID NO: 1608 - DNA, 17 bp, Homo sapiens
tgcagcggcctggatta

SEQ ID NO: 1609 - DNA, 17 bp, Homo sapiens
gcagcggcctggattat

SEQ ID NO: 1610 - DNA, 17 bp, Homo sapiens
cagcggcctggattatt

SEQ ID NO: 1611 - DNA, 17 bp, Homo sapiens
agcggcctggattattc

SEQ ID NO: 1612 - DNA, 17 bp, Homo sapiens
gcggcctggattattcc

SEQ ID NO: 1613 - DNA, 17 bp, Homo sapiens
cggcctggattattcct

SEQ ID NO: 1614 - DNA, 17 bp, Homo sapiens
ggcctggattattccta

SEQ ID NO: 1615 - DNA, 17 bp, Homo sapiens
gcctggattattcctac

SEQ ID NO: 1616 - DNA, 17 bp, Homo sapiens
cctggattattcctacc

SEQ ID NO: 1617 - DNA, 17 bp, Homo sapiens
ctggattattcctacct

SEQ ID NO: 1618 - DNA, 17 bp, Homo sapiens
tggattattcctaccta

SEQ ID NO: 1619 - DNA, 17 bp, Homo sapiens
ggattattcctacctaa

SEQ ID NO: 1620 - DNA, 17 bp, Homo sapiens
gattattcctacctaat

SEQ ID NO: 1621 - DNA, 17 bp, Homo sapiens
attattcctacctaatt

SEQ ID NO: 1622 - DNA, 17 bp, Homo sapiens
ttattcctacctaattg

SEQ ID NO: 1623 - DNA, 17 bp, Homo sapiens
tattcctacctaattgg

SEQ ID NO: 1624 - DNA, 17 bp, Homo sapiens
attcctacctaattggc

SEQ ID NO: 1625 - DNA, 17 bp, Homo sapiens
ttcctacctaattggcc

SEQ ID NO: 1626 - DNA, 17 bp, Homo sapiens
tcctacctaattggccg

SEQ ID NO: 1627 - DNA, 17 bp, Homo sapiens
cctacctaattggccgg

SEQ ID NO: 1628 - DNA, 17 bp, Homo sapiens
ctacctaattggccggt

SEQ ID NO: 1629 - DNA, 17 bp, Homo sapiens
tacctaattggccggtt

SEQ ID NO: 1630 - DNA, 17 bp, Homo sapiens
acctaattggccggttg

SEQ ID NO: 1631 - DNA, 17 bp, Homo sapiens
cctaattggccggttgt

SEQ ID NO: 1632 - DNA, 17 bp, Homo sapiens
ctaattggccggttgtc

SEQ ID NO: 1633 - DNA, 17 bp, Homo sapiens
taattggccggttgtcc

SEQ ID NO: 1634 - DNA, 17 bp, Homo sapiens
aattggccggttgtcca

SEQ ID NO: 1635 - DNA, 17 bp, Homo sapiens
attggccggttgtccag

SEQ ID NO: 1636 - DNA, 17 bp, Homo sapiens
ttggccggttgtccagc

SEQ ID NO: 1637 - DNA, 17 bp, Homo sapiens
tggccggttgtccagcg

SEQ ID NO: 1638 - DNA, 17 bp, Homo sapiens
ggccggttgtccagcga

SEQ ID NO: 1639 - DNA, 17 bp, Homo sapiens
gccggttgtccagcgac

SEQ ID NO: 1640 - DNA, 17 bp, Homo sapiens
ccggttgtccagcgacc

SEQ ID NO: 1641 - DNA, 17 bp, Homo sapiens
cggttgtccagcgaccg

SEQ ID NO: 1642 - DNA, 17 bp, Homo sapiens
ggttgtccagcgaccgg

SEQ ID NO: 1643 - DNA, 17 bp, Homo sapiens
gttgtccagcgaccggc

SEQ ID NO: 1644 - DNA, 17 bp, Homo sapiens
ttgtccagcgaccggcg

SEQ ID NO: 1645 - DNA, 17 bp, Homo sapiens
tgtccagcgaccggcga

SEQ ID NO: 1646 - DNA, 17 bp, Homo sapiens
gtccagcgaccggcgaa

SEQ ID NO: 1647 - DNA, 17 bp, Homo sapiens
tccagcgaccggcgaaa

SEQ ID NO: 1648 - DNA, 17 bp, Homo sapiens
ccagcgaccggcgaaag

SEQ ID NO: 1649 - DNA, 17 bp, Homo sapiens
cagcgaccggcgaaagg

SEQ ID NO: 1650 - DNA, 17 bp, Homo sapiens
agcgaccggcgaaagga

SEQ ID NO: 1651 - DNA, 17 bp, Homo sapiens
gcgaccggcgaaaggag

SEQ ID NO: 1652 - DNA, 17 bp, Homo sapiens
cgaccggcgaaaggaga

SEQ ID NO: 1653 - DNA, 17 bp, Homo sapiens
gaccggcgaaaggagag

SEQ ID NO: 1654 - DNA, 17 bp, Homo sapiens
accggcgaaaggagagc

SEQ ID NO: 1655 - DNA, 17 bp, Homo sapiens
ccggcgaaaggagagca

SEQ ID NO: 1656 - DNA, 17 bp, Homo sapiens
cggcgaaaggagagcac

SEQ ID NO: 1657 - DNA, 17 bp, Homo sapiens
ggcgaaaggagagcact

SEQ ID NO: 1658 - DNA, 17 bp, Homo sapiens
gcgaaaggagagcactc

SEQ ID NO: 1659 - DNA, 17 bp, Homo sapiens
cgaaaggagagcactcg

SEQ ID NO: 1660 - DNA, 17 bp, Homo sapiens
gaaaggagagcactcgg

SEQ ID NO: 1661 - DNA, 17 bp, Homo sapiens
aaaggagagcactcgga

SEQ ID NO: 1662 - DNA, 17 bp, Homo sapiens
aaggagagcactcggat

SEQ ID NO: 1663 - DNA, 17 bp, Homo sapiens
aggagagcactcggatt

SEQ ID NO: 1664 - DNA, 17 bp, Homo sapiens
ggagagcactcggattg

SEQ ID NO: 1665 - DNA, 17 bp, Homo sapiens
gagagcactcggattgc

SEQ ID NO: 1666 - DNA, 17 bp, Homo sapiens
agagcactcggattgca

SEQ ID NO: 1667 - DNA, 17 bp, Homo sapiens
gagcactcggattgcag

SEQ ID NO: 1668 - DNA, 17 bp, Homo sapiens
agcactcggattgcaga

SEQ ID NO: 1669 - DNA, 17 bp, Homo sapiens
gcactcggattgcagaa

SEQ ID NO: 1670 - DNA, 17 bp, Homo sapiens
cactcggattgcagaag

SEQ ID NO: 1671 - DNA, 17 bp, Homo sapiens
actcggattgcagaagc

SEQ ID NO: 1672 - DNA, 17 bp, Homo sapiens
ctcggattgcagaagcc

SEQ ID NO: 1673 - DNA, 17 bp, Homo sapiens
tcggattgcagaagcca

SEQ ID NO: 1674 - DNA, 17 bp, Homo sapiens
cggattgcagaagccat

SEQ ID NO: 1675 - DNA, 17 bp, Homo sapiens
ggattgcagaagccatc

SEQ ID NO: 1676 - DNA, 17 bp, Homo sapiens
gattgcagaagccatca

SEQ ID NO: 1677 - DNA, 17 bp, Homo sapiens
attgcagaagccatcag

SEQ ID NO: 1678 - DNA, 17 bp, Homo sapiens
ttgcagaagccatcagg

SEQ ID NO: 1679 - DNA, 17 bp, Homo sapiens
tgcagaagccatcaggg

SEQ ID NO: 1680 - DNA, 17 bp, Homo sapiens
gcagaagccatcaggga

SEQ ID NO: 1681 - DNA, 17 bp, Homo sapiens
cagaagccatcagggac

SEQ ID NO: 1682 - DNA, 17 bp, Homo sapiens
agaagccatcagggact

SEQ ID NO: 1683 - DNA, 17 bp, Homo sapiens
gaagccatcagggactt

SEQ ID NO: 1684 - DNA, 17 bp, Homo sapiens
aagccatcagggacttt

SEQ ID NO: 1685 - DNA, 17 bp, Homo sapiens
agccatcagggactttg

SEQ ID NO: 1686 - DNA, 17 bp, Homo sapiens
gccatcagggactttgt

SEQ ID NO: 1687 - DNA, 17 bp, Homo sapiens
ccatcagggactttgtg

SEQ ID NO: 1688 - DNA, 17 bp, Homo sapiens
catcagggactttgtga

SEQ ID NO: 1689 - DNA, 17 bp, Homo sapiens
atcagggactttgtgaa

SEQ ID NO: 1690 - DNA, 17 bp, Homo sapiens
tcagggactttgtgaag

SEQ ID NO: 1691 - DNA, 17 bp, Homo sapiens
cagggactttgtgaagg

SEQ ID NO: 1692 - DNA, 17 bp, Homo sapiens
agggactttgtgaaggc

SEQ ID NO: 1693 - DNA, 17 bp, Homo sapiens
gggactttgtgaaggcc

SEQ ID NO: 1694 - DNA, 17 bp, Homo sapiens
ggactttgtgaaggcct

SEQ ID NO: 1695 - DNA, 17 bp, Homo sapiens
gactttgtgaaggcctt

SEQ ID NO: 1696 - DNA, 17 bp, Homo sapiens
actttgtgaaggccttt

SEQ ID NO: 1697 - DNA, 17 bp, Homo sapiens
ctttgtgaaggccttta

SEQ ID NO: 1698 - DNA, 17 bp, Homo sapiens
tttgtgaaggcctttat

SEQ ID NO: 1699 - DNA, 17 bp, Homo sapiens
ttgtgaaggcctttatc

SEQ ID NO: 1700 - DNA, 17 bp, Homo sapiens
tgtgaaggcctttatcc

SEQ ID NO: 1701 - DNA, 17 bp, Homo sapiens
gtgaaggcctttatcca

SEQ ID NO: 1702 - DNA, 17 bp, Homo sapiens
tgaaggcctttatccag

SEQ ID NO: 1703 - DNA, 17 bp, Homo sapiens
gaaggcctttatccagt

SEQ ID NO: 1704 - DNA, 17 bp, Homo sapiens
aaggcctttatccagtt

SEQ ID NO: 1705 - DNA, 17 bp, Homo sapiens
aggcctttatccagttt

SEQ ID NO: 1706 - DNA, 17 bp, Homo sapiens
ggcctttatccagttta

SEQ ID NO: 1707 - DNA, 17 bp, Homo sapiens
gcctttatccagtttaa

SEQ ID NO: 1708 - DNA, 17 bp, Homo sapiens
cctttatccagtttaag

SEQ ID NO: 1709 - DNA, 17 bp, Homo sapiens
ctttatccagtttaaga

SEQ ID NO: 1710 - DNA, 17 bp, Homo sapiens
tttatccagtttaagaa

SEQ ID NO: 1711 - DNA, 17 bp, Homo sapiens
ttatccagtttaagaag

SEQ ID NO: 1712 - DNA, 17 bp, Homo sapiens
tatccagtttaagaagc

SEQ ID NO: 1713 - DNA, 17 bp, Homo sapiens
atccagtttaagaagcc

SEQ ID NO: 1714 - DNA, 17 bp, Homo sapiens
tccagtttaagaagcct

SEQ ID NO: 1715 - DNA, 17 bp, Homo sapiens
ccagtttaagaagccta

SEQ ID NO: 1716 - DNA, 17 bp, Homo sapiens
cagtttaagaagcctat

SEQ ID NO: 1717 - DNA, 17 bp, Homo sapiens
agtttaagaagcctatc

SEQ ID NO: 1718 - DNA, 17 bp, Homo sapiens
gtttaagaagcctatcg

SEQ ID NO: 1719 - DNA, 17 bp, Homo sapiens
tttaagaagcctatcgt

SEQ ID NO: 1720 - DNA, 17 bp, Homo sapiens
ttaagaagcctatcgtg

SEQ ID NO: 1721 - DNA, 17 bp, Homo sapiens
taagaagcctatcgtgg

SEQ ID NO: 1722 - DNA, 17 bp, Homo sapiens
aagaagcctatcgtggt

SEQ ID NO: 1723 - DNA, 17 bp, Homo sapiens
agaagcctatcgtggtg

SEQ ID NO: 1724 - DNA, 17 bp, Homo sapiens
gaagcctatcgtggtgg

SEQ ID NO: 1725 - DNA, 17 bp, Homo sapiens
aagcctatcgtggtggc

SEQ ID NO: 1726 - DNA, 17 bp, Homo sapiens
agcctatcgtggtggcc

SEQ ID NO: 1727 - DNA, 17 bp, Homo sapiens
gcctatcgtggtggcca

SEQ ID NO: 1728 - DNA, 17 bp, Homo sapiens
cctatcgtggtggccat

SEQ ID NO: 1729 - DNA, 17 bp, Homo sapiens
ctatcgtggtggccatc

SEQ ID NO: 1730 - DNA, 17 bp, Homo sapiens
tatcgtggtggccatca

SEQ ID NO: 1731 - DNA, 17 bp, Homo sapiens
atcgtggtggccatcaa

SEQ ID NO: 1732 - DNA, 17 bp, Homo sapiens
tcgtggtggccatcaat

SEQ ID NO: 1733 - DNA, 17 bp, Homo sapiens
cgtggtggccatcaatg

SEQ ID NO: 1734 - DNA, 17 bp, Homo sapiens
gtggtggccatcaatgg

SEQ ID NO: 1735 - DNA, 17 bp, Homo sapiens
tggtggccatcaatggg

SEQ ID NO: 1736 - DNA, 17 bp, Homo sapiens
ggtggccatcaatgggc

SEQ ID NO: 1737 - DNA, 17 bp, Homo sapiens
gtggccatcaatgggcc

SEQ ID NO: 1738 - DNA, 17 bp, Homo sapiens
tggccatcaatgggccg

SEQ ID NO: 1739 - DNA, 17 bp, Homo sapiens
ggccatcaatgggccgg

SEQ ID NO: 1740 - DNA, 17 bp, Homo sapiens
gccatcaatgggccggc

SEQ ID NO: 1741 - DNA, 17 bp, Homo sapiens
ccatcaatgggccggcc

SEQ ID NO: 1742 - DNA, 17 bp, Homo sapiens
catcaatgggccggccc

SEQ ID NO: 1743 - DNA, 17 bp, Homo sapiens
atcaatgggccggccct

SEQ ID NO: 1744 - DNA, 17 bp, Homo sapiens
tcaatgggccggccctg

SEQ ID NO: 1745 - DNA, 17 bp, Homo sapiens
caatgggccggccctgg

SEQ ID NO: 1746 - DNA, 17 bp, Homo sapiens
aatgggccggccctggg

SEQ ID NO: 1747 - DNA, 17 bp, Homo sapiens
atgggccggccctgggc

SEQ ID NO: 1748 - DNA, 17 bp, Homo sapiens
tgggccggccctgggcc

SEQ ID NO: 1749 - DNA, 17 bp, Homo sapiens
gggccggccctgggcct

SEQ ID NO: 1750 - DNA, 17 bp, Homo sapiens
ggccggccctgggcctg

SEQ ID NO: 1751 - DNA, 17 bp, Homo sapiens
gccggccctgggcctgg

SEQ ID NO: 1752 - DNA, 17 bp, Homo sapiens
ccggccctgggcctggg

SEQ ID NO: 1753 - DNA, 17 bp, Homo sapiens
cggccctgggcctgggt

SEQ ID NO: 1754 - DNA, 17 bp, Homo sapiens
ggccctgggcctgggtg

SEQ ID NO: 1755 - DNA, 17 bp, Homo sapiens
gccctgggcctgggtgc

SEQ ID NO: 1756 - DNA, 17 bp, Homo sapiens
ccctgggcctgggtgcc

SEQ ID NO: 1757 - DNA, 17 bp, Homo sapiens
cctgggcctgggtgcct

SEQ ID NO: 1758 - DNA, 17 bp, Homo sapiens
ctgggcctgggtgcctc

SEQ ID NO: 1759 - DNA, 17 bp, Homo sapiens
tgggcctgggtgcctcc

SEQ ID NO: 1760 - DNA, 17 bp, Homo sapiens
gggcctgggtgcctcca

SEQ ID NO: 1761 - DNA, 17 bp, Homo sapiens
ggcctgggtgcctccat

SEQ ID NO: 1762 - DNA, 17 bp, Homo sapiens
gcctgggtgcctccatc

SEQ ID NO: 1763 - DNA, 17 bp, Homo sapiens
cctgggtgcctccatcc

SEQ ID NO: 1764 - DNA, 17 bp, Homo sapiens
ctgggtgcctccatcct

SEQ ID NO: 1765 - DNA, 17 bp, Homo sapiens
tgggtgcctccatcctg

SEQ ID NO: 1766 - DNA, 17 bp, Homo sapiens
gggtgcctccatcctgc

SEQ ID NO: 1767 - DNA, 17 bp, Homo sapiens
ggtgcctccatcctgcc

SEQ ID NO: 1768 - DNA, 17 bp, Homo sapiens
gtgcctccatcctgccc

SEQ ID NO: 1769 - DNA, 17 bp, Homo sapiens
tgcctccatcctgcccc

SEQ ID NO: 1770 - DNA, 17 bp, Homo sapiens
gcctccatcctgcccct

SEQ ID NO: 1771 - DNA, 17 bp, Homo sapiens
cctccatcctgcccctc

SEQ ID NO: 1772 - DNA, 17 bp, Homo sapiens
ctccatcctgcccctct

SEQ ID NO: 1773 - DNA, 17 bp, Homo sapiens
tccatcctgcccctctg

SEQ ID NO: 1774 - DNA, 17 bp, Homo sapiens
ccatcctgcccctctgt

SEQ ID NO: 1775 - DNA, 17 bp, Homo sapiens
catcctgcccctctgtg

SEQ ID NO: 1776 - DNA, 17 bp, Homo sapiens
atcctgcccctctgtga

SEQ ID NO: 1777 - DNA, 17 bp, Homo sapiens
tcctgcccctctgtgac

SEQ ID NO: 1778 - DNA, 17 bp, Homo sapiens
cctgcccctctgtgaca

SEQ ID NO: 1779 - DNA, 17 bp, Homo sapiens
ctgcccctctgtgacat

SEQ ID NO: 1780 - DNA, 17 bp, Homo sapiens
tgcccctctgtgacatc

SEQ ID NO: 1781 - DNA, 17 bp, Homo sapiens
gcccctctgtgacatcg

SEQ ID NO: 1782 - DNA, 17 bp, Homo sapiens
cccctctgtgacatcgt

SEQ ID NO: 1783 - DNA, 17 bp, Homo sapiens
ccctctgtgacatcgtg

SEQ ID NO: 1784 - DNA, 17 bp, Homo sapiens
cctctgtgacatcgtgt

SEQ ID NO: 1785 - DNA, 17 bp, Homo sapiens
ctctgtgacatcgtgtg

SEQ ID NO: 1786 - DNA, 17 bp, Homo sapiens
tctgtgacatcgtgtgg

SEQ ID NO: 1787 - DNA, 17 bp, Homo sapiens
ctgtgacatcgtgtggg

SEQ ID NO: 1788 - DNA, 17 bp, Homo sapiens
tgtgacatcgtgtgggc

SEQ ID NO: 1789 - DNA, 17 bp, Homo sapiens
gtgacatcgtgtgggcc

SEQ ID NO: 1790 - DNA, 17 bp, Homo sapiens
tgacatcgtgtgggcca

SEQ ID NO: 1791 - DNA, 17 bp, Homo sapiens
gacatcgtgtgggccag

SEQ ID NO: 1792 - DNA, 17 bp, Homo sapiens
acatcgtgtgggccagt

SEQ ID NO: 1793 - DNA, 17 bp, Homo sapiens
catcgtgtgggccagtg

SEQ ID NO: 1794 - DNA, 17 bp, Homo sapiens
atcgtgtgggccagtga

SEQ ID NO: 1795 - DNA, 17 bp, Homo sapiens
tcgtgtgggccagtgag

SEQ ID NO: 1796 - DNA, 17 bp, Homo sapiens
cgtgtgggccagtgaga

SEQ ID NO: 1797 - DNA, 17 bp, Homo sapiens
gtgtgggccagtgagaa

SEQ ID NO: 1798 - DNA, 17 bp, Homo sapiens
tgtgggccagtgagaag

SEQ ID NO: 1799 - DNA, 17 bp, Homo sapiens
gtgggccagtgagaagg

SEQ ID NO: 1800 - DNA, 17 bp, Homo sapiens
tgggccagtgagaaggc

SEQ ID NO: 1801 - DNA, 17 bp, Homo sapiens
gggccagtgagaaggcc

SEQ ID NO: 1802 - DNA, 17 bp, Homo sapiens
ggccagtgagaaggcct

SEQ ID NO: 1803 - DNA, 17 bp, Homo sapiens
gccagtgagaaggcctg

SEQ ID NO: 1804 - DNA, 17 bp, Homo sapiens
ccagtgagaaggcctgg

SEQ ID NO: 1805 - DNA, 17 bp, Homo sapiens
cagtgagaaggcctggt

SEQ ID NO: 1806 - DNA, 17 bp, Homo sapiens
agtgagaaggcctggtt

SEQ ID NO: 1807 - DNA, 17 bp, Homo sapiens
gtgagaaggcctggttc

SEQ ID NO: 1808 - DNA, 17 bp, Homo sapiens
tgagaaggcctggttcc

SEQ ID NO: 1809 - DNA, 17 bp, Homo sapiens
gagaaggcctggttcca

SEQ ID NO: 1810 - DNA, 17 bp, Homo sapiens
agaaggcctggttccag

SEQ ID NO: 1811 - DNA, 17 bp, Homo sapiens
gaaggcctggttccaga

SEQ ID NO: 1812 - DNA, 17 bp, Homo sapiens
aaggcctggttccagac

SEQ ID NO: 1813 - DNA, 17 bp, Homo sapiens
aggcctggttccagacg

SEQ ID NO: 1814 - DNA, 17 bp, Homo sapiens
ggcctggttccagacgc

SEQ ID NO: 1815 - DNA, 17 bp, Homo sapiens
gcctggttccagacgcc

SEQ ID NO: 1816 - DNA, 17 bp, Homo sapiens
cctggttccagacgccc

SEQ ID NO: 1817 - DNA, 17 bp, Homo sapiens
ctggttccagacgccct

SEQ ID NO: 1818 - DNA, 17 bp, Homo sapiens
tggttccagacgcccta

SEQ ID NO: 1819 - DNA, 17 bp, Homo sapiens
ggttccagacgccctac

SEQ ID NO: 1820 - DNA, 17 bp, Homo sapiens
gttccagacgccctacg

SEQ ID NO: 1821 - DNA, 17 bp, Homo sapiens
ttccagacgccctacgc

SEQ ID NO: 1822 - DNA, 17 bp, Homo sapiens
tccagacgccctacgcc

SEQ ID NO: 1823 - DNA, 17 bp, Homo sapiens
ccagacgccctacgcca

SEQ ID NO: 1824 - DNA, 17 bp, Homo sapiens
cagacgccctacgccac

SEQ ID NO: 1825 - DNA, 17 bp, Homo sapiens
agacgccctacgccacc

SEQ ID NO: 1826 - DNA, 17 bp, Homo sapiens
gacgccctacgccacca

SEQ ID NO: 1827 - DNA, 17 bp, Homo sapiens
acgccctacgccaccat

SEQ ID NO: 1828 - DNA, 17 bp, Homo sapiens
cgccctacgccaccatc

SEQ ID NO: 1829 - DNA, 17 bp, Homo sapiens
gccctacgccaccatcc

SEQ ID NO: 1830 - DNA, 17 bp, Homo sapiens
ccctacgccaccatccg

SEQ ID NO: 1831 - DNA, 17 bp, Homo sapiens
cctacgccaccatccgc

SEQ ID NO: 1832 - DNA, 17 bp, Homo sapiens
ctacgccaccatccgcc

SEQ ID NO: 1833 - DNA, 17 bp, Homo sapiens
tacgccaccatccgcct

SEQ ID NO: 1834 - DNA, 17 bp, Homo sapiens
acgccaccatccgcctc

SEQ ID NO: 1835 - DNA, 17 bp, Homo sapiens
cgccaccatccgcctca

SEQ ID NO: 1836 - DNA, 17 bp, Homo sapiens
gccaccatccgcctcac

SEQ ID NO: 1837 - DNA, 17 bp, Homo sapiens
ccaccatccgcctcacg

SEQ ID NO: 1838 - DNA, 17 bp, Homo sapiens
caccatccgcctcacgc

SEQ ID NO: 1839 - DNA, 17 bp, Homo sapiens
accatccgcctcacgcc

SEQ ID NO: 1840 - DNA, 17 bp, Homo sapiens
ccatccgcctcacgcct

SEQ ID NO: 1841 - DNA, 17 bp, Homo sapiens
catccgcctcacgcctg

SEQ ID NO: 1842 - DNA, 17 bp, Homo sapiens
atccgcctcacgcctgc

SEQ ID NO: 1843 - DNA, 17 bp, Homo sapiens
tccgcctcacgcctgct

SEQ ID NO: 1844 - DNA, 17 bp, Homo sapiens
ccgcctcacgcctgctg

SEQ ID NO: 1845 - DNA, 17 bp, Homo sapiens
cgcctcacgcctgctgg

SEQ ID NO: 1846 - DNA, 17 bp, Homo sapiens
gcctcacgcctgctggc

SEQ ID NO: 1847 - DNA, 17 bp, Homo sapiens
cctcacgcctgctggct

SEQ ID NO: 1848 - DNA, 17 bp, Homo sapiens
ctcacgcctgctggctg

SEQ ID NO: 1849 - DNA, 17 bp, Homo sapiens
tcacgcctgctggctgc

SEQ ID NO: 1850 - DNA, 17 bp, Homo sapiens
cacgcctgctggctgct

SEQ ID NO: 1851 - DNA, 17 bp, Homo sapiens
acgcctgctggctgctc

SEQ ID NO: 1852 - DNA, 17 bp, Homo sapiens
cgcctgctggctgctcc

SEQ ID NO: 1853 - DNA, 17 bp, Homo sapiens
gcctgctggctgctcct

SEQ ID NO: 1854 - DNA, 17 bp, Homo sapiens
cctgctggctgctcctc

SEQ ID NO: 1855 - DNA, 17 bp, Homo sapiens
ctgctggctgctcctcc

SEQ ID NO: 1856 - DNA, 17 bp, Homo sapiens
tgctggctgctcctcct

SEQ ID NO: 1857 - DNA, 17 bp, Homo sapiens
gctggctgctcctccta

SEQ ID NO: 1858 - DNA, 17 bp, Homo sapiens
ctggctgctcctcctac

SEQ ID NO: 1859 - DNA, 17 bp, Homo sapiens
tggctgctcctcctaca

SEQ ID NO: 1860 - DNA, 17 bp, Homo sapiens
ggctgctcctcctacac

SEQ ID NO: 1861 - DNA, 17 bp, Homo sapiens
gctgctcctcctacacc

SEQ ID NO: 1862 - DNA, 17 bp, Homo sapiens
ctgctcctcctacacct

SEQ ID NO: 1863 - DNA, 17 bp, Homo sapiens
tgctcctcctacacctt

SEQ ID NO: 1864 - DNA, 17 bp, Homo sapiens
gctcctcctacaccttc

SEQ ID NO: 1865 - DNA, 17 bp, Homo sapiens
ctcctcctacaccttcc

SEQ ID NO: 1866 - DNA, 17 bp, Homo sapiens
tcctcctacaccttccc

SEQ ID NO: 1867 - DNA, 17 bp, Homo sapiens
cctcctacaccttcccc

SEQ ID NO: 1868 - DNA, 17 bp, Homo sapiens
ctcctacaccttccccc

SEQ ID NO: 1869 - DNA, 17 bp, Homo sapiens
tcctacaccttccccca

SEQ ID NO: 1870 - DNA, 17 bp, Homo sapiens
cctacaccttcccccag

SEQ ID NO: 1871 - DNA, 17 bp, Homo sapiens
ctacaccttcccccaga

SEQ ID NO: 1872 - DNA, 17 bp, Homo sapiens
tacaccttcccccagat

SEQ ID NO: 1873 - DNA, 17 bp, Homo sapiens
acaccttcccccagatc

SEQ ID NO: 1874 - DNA, 17 bp, Homo sapiens
caccttcccccagatcc

SEQ ID NO: 1875 - DNA, 17 bp, Homo sapiens
accttcccccagatcct

SEQ ID NO: 1876 - DNA, 17 bp, Homo sapiens
ccttcccccagatcctg

SEQ ID NO: 1877 - DNA, 17 bp, Homo sapiens
cttcccccagatcctgg

SEQ ID NO: 1878 - DNA, 17 bp, Homo sapiens
ttcccccagatcctggg

SEQ ID NO: 1879 - DNA, 17 bp, Homo sapiens
tcccccagatcctgggc

SEQ ID NO: 1880 - DNA, 17 bp, Homo sapiens
cccccagatcctgggcg

SEQ ID NO: 1881 - DNA, 17 bp, Homo sapiens
ccccagatcctgggcgt

SEQ ID NO: 1882 - DNA, 17 bp, Homo sapiens
cccagatcctgggcgtc

SEQ ID NO: 1883 - DNA, 17 bp, Homo sapiens
ccagatcctgggcgtcg

SEQ ID NO: 1884 - DNA, 17 bp, Homo sapiens
cagatcctgggcgtcgc

SEQ ID NO: 1885 - DNA, 17 bp, Homo sapiens
agatcctgggcgtcgcg

SEQ ID NO: 1886 - DNA, 17 bp, Homo sapiens
gatcctgggcgtcgcgc

SEQ ID NO: 1887 - DNA, 17 bp, Homo sapiens
atcctgggcgtcgcgct

SEQ ID NO: 1888 - DNA, 17 bp, Homo sapiens
tcctgggcgtcgcgctg

SEQ ID NO: 1889 - DNA, 17 bp, Homo sapiens
cctgggcgtcgcgctgg

SEQ ID NO: 1890 - DNA, 17 bp, Homo sapiens
ctgggcgtcgcgctggc

SEQ ID NO: 1891 - DNA, 17 bp, Homo sapiens
tgggcgtcgcgctggcc

SEQ ID NO: 1892 - DNA, 17 bp, Homo sapiens
gggcgtcgcgctggcca

SEQ ID NO: 1893 - DNA, 17 bp, Homo sapiens
ggcgtcgcgctggccaa

SEQ ID NO: 1894 - DNA, 17 bp, Homo sapiens
gcgtcgcgctggccaat

SEQ ID NO: 1895 - DNA, 17 bp, Homo sapiens
cgtcgcgctggccaatg

SEQ ID NO: 1896 - DNA, 17 bp, Homo sapiens
gtcgcgctggccaatga

SEQ ID NO: 1897 - DNA, 17 bp, Homo sapiens
tcgcgctggccaatgag

SEQ ID NO: 1898 - DNA, 17 bp, Homo sapiens
cgcgctggccaatgaga

SEQ ID NO: 1899 - DNA, 17 bp, Homo sapiens
gcgctggccaatgagat

SEQ ID NO: 1900 - DNA, 17 bp, Homo sapiens
cgctggccaatgagatg

SEQ ID NO: 1901 - DNA, 17 bp, Homo sapiens
gctggccaatgagatgc

SEQ ID NO: 1902 - DNA, 17 bp, Homo sapiens
ctggccaatgagatgct

SEQ ID NO: 1903 - DNA, 17 bp, Homo sapiens
tggccaatgagatgctg

SEQ ID NO: 1904 - DNA, 17 bp, Homo sapiens
ggccaatgagatgctgt

SEQ ID NO: 1905 - DNA, 17 bp, Homo sapiens
gccaatgagatgctgtt

SEQ ID NO: 1906 - DNA, 17 bp, Homo sapiens
ccaatgagatgctgttc

SEQ ID NO: 1907 - DNA, 17 bp, Homo sapiens
caatgagatgctgttct

SEQ ID NO: 1908 - DNA, 17 bp, Homo sapiens
aatgagatgctgttctg

SEQ ID NO: 1909 - DNA, 17 bp, Homo sapiens
atgagatgctgttctgt

SEQ ID NO: 1910 - DNA, 17 bp, Homo sapiens
tgagatgctgttctgtg

SEQ ID NO: 1911 - DNA, 17 bp, Homo sapiens
gagatgctgttctgtgg

SEQ ID NO: 1912 - DNA, 17 bp, Homo sapiens
agatgctgttctgtggg

SEQ ID NO: 1913 - DNA, 17 bp, Homo sapiens
gatgctgttctgtgggc

SEQ ID NO: 1914 - DNA, 17 bp, Homo sapiens
atgctgttctgtgggcg

SEQ ID NO: 1915 - DNA, 17 bp, Homo sapiens
tgctgttctgtgggcgg

SEQ ID NO: 1916 - DNA, 17 bp, Homo sapiens
gctgttctgtgggcgga

SEQ ID NO: 1917 - DNA, 17 bp, Homo sapiens
ctgttctgtgggcggaa

SEQ ID NO: 1918 - DNA, 17 bp, Homo sapiens
tgttctgtgggcggaag

SEQ ID NO: 1919 - DNA, 17 bp, Homo sapiens
gttctgtgggcggaagc

SEQ ID NO: 1920 - DNA, 17 bp, Homo sapiens
ttctgtgggcggaagct

SEQ ID NO: 1921 - DNA, 17 bp, Homo sapiens
tctgtgggcggaagctc

SEQ ID NO: 1922 - DNA, 17 bp, Homo sapiens
ctgtgggcggaagctca

SEQ ID NO: 1923 - DNA, 17 bp, Homo sapiens
tgtgggcggaagctcac

SEQ ID NO: 1924 - DNA, 17 bp, Homo sapiens
gtgggcggaagctcacc

SEQ ID NO: 1925 - DNA, 17 bp, Homo sapiens
tgggcggaagctcaccg

SEQ ID NO: 1926 - DNA, 17 bp, Homo sapiens
gggcggaagctcaccgc

SEQ ID NO: 1927 - DNA, 17 bp, Homo sapiens
ggcggaagctcaccgcc

SEQ ID NO: 1928 - DNA, 17 bp, Homo sapiens
gcggaagctcaccgccc

SEQ ID NO: 1929 - DNA, 17 bp, Homo sapiens
cggaagctcaccgccca

SEQ ID NO: 1930 - DNA, 17 bp, Homo sapiens
ggaagctcaccgcccag

SEQ ID NO: 1931 - DNA, 17 bp, Homo sapiens
gaagctcaccgcccagg

SEQ ID NO: 1932 - DNA, 17 bp, Homo sapiens
aagctcaccgcccagga

SEQ ID NO: 1933 - DNA, 17 bp, Homo sapiens
agctcaccgcccaggag

SEQ ID NO: 1934 - DNA, 17 bp, Homo sapiens
gctcaccgcccaggagg

SEQ ID NO: 1935 - DNA, 17 bp, Homo sapiens
ctcaccgcccaggaggc

SEQ ID NO: 1936 - DNA, 17 bp, Homo sapiens
tcaccgcccaggaggcc

SEQ ID NO: 1937 - DNA, 17 bp, Homo sapiens
caccgcccaggaggcct

SEQ ID NO: 1938 - DNA, 17 bp, Homo sapiens
accgcccaggaggcctg

SEQ ID NO: 1939 - DNA, 17 bp, Homo sapiens
ccgcccaggaggcctgc

SEQ ID NO: 1940 - DNA, 17 bp, Homo sapiens
cgcccaggaggcctgca

SEQ ID NO: 1941 - DNA, 17 bp, Homo sapiens
gcccaggaggcctgcag

SEQ ID NO: 1942 - DNA, 17 bp, Homo sapiens
cccaggaggcctgcagc

SEQ ID NO: 1943 - DNA, 17 bp, Homo sapiens
ccaggaggcctgcagca

SEQ ID NO: 1944 - DNA, 17 bp, Homo sapiens
caggaggcctgcagcag

SEQ ID NO: 1945 - DNA, 17 bp, Homo sapiens
aggaggcctgcagcagg

SEQ ID NO: 1946 - DNA, 17 bp, Homo sapiens
ggaggcctgcagcaggg

SEQ ID NO: 1947 - DNA, 17 bp, Homo sapiens
gaggcctgcagcagggg

SEQ ID NO: 1948 - DNA, 17 bp, Homo sapiens
aggcctgcagcaggggg

SEQ ID NO: 1949 - DNA, 17 bp, Homo sapiens
ggcctgcagcagggggc

SEQ ID NO: 1950 - DNA, 17 bp, Homo sapiens
gcctgcagcagggggct

SEQ ID NO: 1951 - DNA, 17 bp, Homo sapiens
cctgcagcagggggctg

SEQ ID NO: 1952 - DNA, 17 bp, Homo sapiens
ctgcagcagggggctgg

SEQ ID NO: 1953 - DNA, 17 bp, Homo sapiens
tgcagcagggggctggt

SEQ ID NO: 1954 - DNA, 17 bp, Homo sapiens
gcagcagggggctggtg

SEQ ID NO: 1955 - DNA, 17 bp, Homo sapiens
cagcagggggctggtgt

SEQ ID NO: 1956 - DNA, 17 bp, Homo sapiens
agcagggggctggtgtc

SEQ ID NO: 1957 - DNA, 17 bp, Homo sapiens
gcagggggctggtgtcg

SEQ ID NO: 1958 - DNA, 17 bp, Homo sapiens
cagggggctggtgtcgc

SEQ ID NO: 1959 - DNA, 17 bp, Homo sapiens
agggggctggtgtcgca

SEQ ID NO: 1960 - DNA, 17 bp, Homo sapiens
gggggctggtgtcgcag

SEQ ID NO: 1961 - DNA, 17 bp, Homo sapiens
ggggctggtgtcgcagg

SEQ ID NO: 1962 - DNA, 17 bp, Homo sapiens
gggctggtgtcgcaggt

SEQ ID NO: 1963 - DNA, 17 bp, Homo sapiens
ggctggtgtcgcaggtc

SEQ ID NO: 1964 - DNA, 17 bp, Homo sapiens
gctggtgtcgcaggtct

SEQ ID NO: 1965 - DNA, 17 bp, Homo sapiens
ctggtgtcgcaggtctt

SEQ ID NO: 1966 - DNA, 17 bp, Homo sapiens
tggtgtcgcaggtcttc

SEQ ID NO: 1967 - DNA, 17 bp, Homo sapiens
ggtgtcgcaggtcttct

SEQ ID NO: 1968 - DNA, 17 bp, Homo sapiens
gtgtcgcaggtcttctg

SEQ ID NO: 1969 - DNA, 17 bp, Homo sapiens
tgtcgcaggtcttctgg

SEQ ID NO: 1970 - DNA, 17 bp, Homo sapiens
gtcgcaggtcttctggc

SEQ ID NO: 1971 - DNA, 17 bp, Homo sapiens
tcgcaggtcttctggcc

SEQ ID NO: 1972 - DNA, 17 bp, Homo sapiens
cgcaggtcttctggccc

SEQ ID NO: 1973 - DNA, 17 bp, Homo sapiens
gcaggtcttctggccca

SEQ ID NO: 1974 - DNA, 17 bp, Homo sapiens
caggtcttctggcccac

SEQ ID NO: 1975 - DNA, 17 bp, Homo sapiens
aggtcttctggcccacc

SEQ ID NO: 1976 - DNA, 17 bp, Homo sapiens
ggtcttctggcccacca

SEQ ID NO: 1977 - DNA, 17 bp, Homo sapiens
gtcttctggcccaccac

SEQ ID NO: 1978 - DNA, 17 bp, Homo sapiens
tcttctggcccaccacg

SEQ ID NO: 1979 - DNA, 17 bp, Homo sapiens
cttctggcccaccacgt

SEQ ID NO: 1980 - DNA, 17 bp, Homo sapiens
ttctggcccaccacgtt

SEQ ID NO: 1981 - DNA, 17 bp, Homo sapiens
tctggcccaccacgttc

SEQ ID NO: 1982 - DNA, 17 bp, Homo sapiens
ctggcccaccacgttca

SEQ ID NO: 1983 - DNA, 17 bp, Homo sapiens
tggcccaccacgttcag

SEQ ID NO: 1984 - DNA, 17 bp, Homo sapiens
ggcccaccacgttcagc

SEQ ID NO: 1985 - DNA, 17 bp, Homo sapiens
gcccaccacgttcagcc

SEQ ID NO: 1986 - DNA, 17 bp, Homo sapiens
cccaccacgttcagcca

SEQ ID NO: 1987 - DNA, 17 bp, Homo sapiens
ccaccacgttcagccag

SEQ ID NO: 1988 - DNA, 17 bp, Homo sapiens
caccacgttcagccagg

SEQ ID NO: 1989 - DNA, 17 bp, Homo sapiens
accacgttcagccagga

SEQ ID NO: 1990 - DNA, 17 bp, Homo sapiens
ccacgttcagccaggag

SEQ ID NO: 1991 - DNA, 17 bp, Homo sapiens
cacgttcagccaggagg

SEQ ID NO: 1992 - DNA, 17 bp, Homo sapiens
acgttcagccaggaggt

SEQ ID NO: 1993 - DNA, 17 bp, Homo sapiens
cgttcagccaggaggtc

SEQ ID NO: 1994 - DNA, 17 bp, Homo sapiens
gttcagccaggaggtca

SEQ ID NO: 1995 - DNA, 17 bp, Homo sapiens
ttcagccaggaggtcat

SEQ ID NO: 1996 - DNA, 17 bp, Homo sapiens
tcagccaggaggtcatg

SEQ ID NO: 1997 - DNA, 17 bp, Homo sapiens
cagccaggaggtcatgc

SEQ ID NO: 1998 - DNA, 17 bp, Homo sapiens
agccaggaggtcatgct

SEQ ID NO: 1999 - DNA, 17 bp, Homo sapiens
gccaggaggtcatgctg

SEQ ID NO: 2000 - DNA, 17 bp, Homo sapiens
ccaggaggtcatgctgc

SEQ ID NO: 2001 - DNA, 17 bp, Homo sapiens
caggaggtcatgctgcg

SEQ ID NO: 2002 - DNA, 17 bp, Homo sapiens
aggaggtcatgctgcgg

SEQ ID NO: 2003 - DNA, 17 bp, Homo sapiens
ggaggtcatgctgcggg

SEQ ID NO: 2004 - DNA, 17 bp, Homo sapiens
gaggtcatgctgcgggt

SEQ ID NO: 2005 - DNA, 17 bp, Homo sapiens
aggtcatgctgcgggtc

SEQ ID NO: 2006 - DNA, 17 bp, Homo sapiens
ggtcatgctgcgggtca

SEQ ID NO: 2007 - DNA, 17 bp, Homo sapiens
gtcatgctgcgggtcaa

SEQ ID NO: 2008 - DNA, 17 bp, Homo sapiens
tcatgctgcgggtcaag

SEQ ID NO: 2009 - DNA, 17 bp, Homo sapiens
catgctgcgggtcaagg

SEQ ID NO: 2010 - DNA, 17 bp, Homo sapiens
atgctgcgggtcaagga

SEQ ID NO: 2011 - DNA, 17 bp, Homo sapiens
tgctgcgggtcaaggag

SEQ ID NO: 2012 - DNA, 17 bp, Homo sapiens
gctgcgggtcaaggaga

SEQ ID NO: 2013 - DNA, 17 bp, Homo sapiens
ctgcgggtcaaggagat

SEQ ID NO: 2014 - DNA, 17 bp, Homo sapiens
tgcgggtcaaggagatg

SEQ ID NO: 2015 - DNA, 17 bp, Homo sapiens
gcgggtcaaggagatgg

SEQ ID NO: 2016 - DNA, 17 bp, Homo sapiens
cgggtcaaggagatggc

SEQ ID NO: 2017 - DNA, 17 bp, Homo sapiens
gggtcaaggagatggca

SEQ ID NO: 2018 - DNA, 17 bp, Homo sapiens
ggtcaaggagatggcat

SEQ ID NO: 2019 - DNA, 17 bp, Homo sapiens
gtcaaggagatggcatc

SEQ ID NO: 2020 - DNA, 17 bp, Homo sapiens
tcaaggagatggcatcc

SEQ ID NO: 2021 - DNA, 17 bp, Homo sapiens
caaggagatggcatcct

SEQ ID NO: 2022 - DNA, 17 bp, Homo sapiens
aaggagatggcatcctg

SEQ ID NO: 2023 - DNA, 17 bp, Homo sapiens
aggagatggcatcctgc

SEQ ID NO: 2024 - DNA, 17 bp, Homo sapiens
ggagatggcatcctgca

SEQ ID NO: 2025 - DNA, 17 bp, Homo sapiens
gagatggcatcctgcag

SEQ ID NO: 2026 - DNA, 17 bp, Homo sapiens
agatggcatcctgcagt

SEQ ID NO: 2027 - DNA, 17 bp, Homo sapiens
gatggcatcctgcagtg

SEQ ID NO: 2028 - DNA, 17 bp, Homo sapiens
atggcatcctgcagtgc

SEQ ID NO: 2029 - DNA, 17 bp, Homo sapiens
tggcatcctgcagtgcc

SEQ ID NO: 2030 - DNA, 17 bp, Homo sapiens
ggcatcctgcagtgccg

SEQ ID NO: 2031 - DNA, 17 bp, Homo sapiens
gcatcctgcagtgccgt

SEQ ID NO: 2032 - DNA, 17 bp, Homo sapiens
catcctgcagtgccgtg

SEQ ID NO: 2033 - DNA, 17 bp, Homo sapiens
atcctgcagtgccgtgg

SEQ ID NO: 2034 - DNA, 17 bp, Homo sapiens
tcctgcagtgccgtggt

SEQ ID NO: 2035 - DNA, 17 bp, Homo sapiens
cctgcagtgccgtggtg

SEQ ID NO: 2036 - DNA, 17 bp, Homo sapiens
ctgcagtgccgtggtgt

SEQ ID NO: 2037 - DNA, 17 bp, Homo sapiens
tgcagtgccgtggtgtt

SEQ ID NO: 2038 - DNA, 17 bp, Homo sapiens
gcagtgccgtggtgtta

SEQ ID NO: 2039 - DNA, 17 bp, Homo sapiens
cagtgccgtggtgttag

SEQ ID NO: 2040 - DNA, 17 bp, Homo sapiens
agtgccgtggtgttaga

SEQ ID NO: 2041 - DNA, 17 bp, Homo sapiens
gtgccgtggtgttagag

SEQ ID NO: 2042 - DNA, 17 bp, Homo sapiens
tgccgtggtgttagagg

SEQ ID NO: 2043 - DNA, 17 bp, Homo sapiens
gccgtggtgttagagga

SEQ ID NO: 2044 - DNA, 17 bp, Homo sapiens
ccgtggtgttagaggag

SEQ ID NO: 2045 - DNA, 17 bp, Homo sapiens
cgtggtgttagaggagt

SEQ ID NO: 2046 - DNA, 17 bp, Homo sapiens
gtggtgttagaggagtc

SEQ ID NO: 2047 - DNA, 17 bp, Homo sapiens
tggtgttagaggagtcc

SEQ ID NO: 2048 - DNA, 17 bp, Homo sapiens
ggtgttagaggagtcca

SEQ ID NO: 2049 - DNA, 17 bp, Homo sapiens
gtgttagaggagtccaa

SEQ ID NO: 2050 - DNA, 17 bp, Homo sapiens
tgttagaggagtccaaa

SEQ ID NO: 2051 - DNA, 17 bp, Homo sapiens
gttagaggagtccaaat

SEQ ID NO: 2052 - DNA, 17 bp, Homo sapiens
ttagaggagtccaaatg

SEQ ID NO: 2053 - DNA, 17 bp, Homo sapiens
tagaggagtccaaatgc

SEQ ID NO: 2054 - DNA, 17 bp, Homo sapiens
agaggagtccaaatgcc

SEQ ID NO: 2055 - DNA, 17 bp, Homo sapiens
gaggagtccaaatgcct

SEQ ID NO: 2056 - DNA, 17 bp, Homo sapiens
aggagtccaaatgcctc

SEQ ID NO: 2057 - DNA, 17 bp, Homo sapiens
ggagtccaaatgcctcg

SEQ ID NO: 2058 - DNA, 17 bp, Homo sapiens
gagtccaaatgcctcgt

SEQ ID NO: 2059 - DNA, 17 bp, Homo sapiens
agtccaaatgcctcgtg

SEQ ID NO: 2060 - DNA, 17 bp, Homo sapiens
gtccaaatgcctcgtgc

SEQ ID NO: 2061 - DNA, 17 bp, Homo sapiens
tccaaatgcctcgtgcg

SEQ ID NO: 2062 - DNA, 17 bp, Homo sapiens
ccaaatgcctcgtgcgg

SEQ ID NO: 2063 - DNA, 17 bp, Homo sapiens
caaatgcctcgtgcgga

SEQ ID NO: 2064 - DNA, 17 bp, Homo sapiens
aaatgcctcgtgcggag

SEQ ID NO: 2065 - DNA, 17 bp, Homo sapiens
aatgcctcgtgcggagc

SEQ ID NO: 2066 - DNA, 17 bp, Homo sapiens
atgcctcgtgcggagct

SEQ ID NO: 2067 - DNA, 17 bp, Homo sapiens
tgcctcgtgcggagctt

SEQ ID NO: 2068 - DNA, 17 bp, Homo sapiens
gcctcgtgcggagcttc

SEQ ID NO: 2069 - DNA, 17 bp, Homo sapiens
cctcgtgcggagcttcc

SEQ ID NO: 2070 - DNA, 17 bp, Homo sapiens
ctcgtgcggagcttcct

SEQ ID NO: 2071 - DNA, 17 bp, Homo sapiens
tcgtgcggagcttcctg

SEQ ID NO: 2072 - DNA, 17 bp, Homo sapiens
cgtgcggagcttcctga

SEQ ID NO: 2073 - DNA, 17 bp, Homo sapiens
gtgcggagcttcctgaa

SEQ ID NO: 2074 - DNA, 17 bp, Homo sapiens
tgcggagcttcctgaaa

SEQ ID NO: 2075 - DNA, 17 bp, Homo sapiens
gcggagcttcctgaaat

SEQ ID NO: 2076 - DNA, 17 bp, Homo sapiens
cggagcttcctgaaatc

SEQ ID NO: 2077 - DNA, 17 bp, Homo sapiens
ggagcttcctgaaatca

SEQ ID NO: 2078 - DNA, 17 bp, Homo sapiens
gagcttcctgaaatcag

SEQ ID NO: 2079 - DNA, 17 bp, Homo sapiens
agcttcctgaaatcagt

SEQ ID NO: 2080 - DNA, 17 bp, Homo sapiens
gcttcctgaaatcagtg

SEQ ID NO: 2081 - DNA, 17 bp, Homo sapiens
cttcctgaaatcagtgc

SEQ ID NO: 2082 - DNA, 17 bp, Homo sapiens
ttcctgaaatcagtgct

SEQ ID NO: 2083 - DNA, 17 bp, Homo sapiens
tcctgaaatcagtgctg

SEQ ID NO: 2084 - DNA, 17 bp, Homo sapiens
cctgaaatcagtgctgg

SEQ ID NO: 2085 - DNA, 17 bp, Homo sapiens
ctgaaatcagtgctgga

SEQ ID NO: 2086 - DNA, 17 bp, Homo sapiens
tgaaatcagtgctggaa

SEQ ID NO: 2087 - DNA, 17 bp, Homo sapiens
gaaatcagtgctggaag

SEQ ID NO: 2088 - DNA, 17 bp, Homo sapiens
aaatcagtgctggaaga

SEQ ID NO: 2089 - DNA, 17 bp, Homo sapiens
aatcagtgctggaagac

SEQ ID NO: 2090 - DNA, 17 bp, Homo sapiens
atcagtgctggaagacg

SEQ ID NO: 2091 - DNA, 17 bp, Homo sapiens
tcagtgctggaagacgt

SEQ ID NO: 2092 - DNA, 17 bp, Homo sapiens
cagtgctggaagacgtg

SEQ ID NO: 2093 - DNA, 17 bp, Homo sapiens
agtgctggaagacgtga

SEQ ID NO: 2094 - DNA, 17 bp, Homo sapiens
gtgctggaagacgtgaa

SEQ ID NO: 2095 - DNA, 17 bp, Homo sapiens
tgctggaagacgtgaac

SEQ ID NO: 2096 - DNA, 17 bp, Homo sapiens
gctggaagacgtgaacg

SEQ ID NO: 2097 - DNA, 17 bp, Homo sapiens
ctggaagacgtgaacga

SEQ ID NO: 2098 - DNA, 17 bp, Homo sapiens
tggaagacgtgaacgag

SEQ ID NO: 2099 - DNA, 17 bp, Homo sapiens
ggaagacgtgaacgaga

SEQ ID NO: 2100 - DNA, 17 bp, Homo sapiens
gaagacgtgaacgagaa

SEQ ID NO: 2101 - DNA, 17 bp, Homo sapiens
aagacgtgaacgagaag

SEQ ID NO: 2102 - DNA, 17 bp, Homo sapiens
agacgtgaacgagaagg

SEQ ID NO: 2103 - DNA, 17 bp, Homo sapiens
gacgtgaacgagaagga

SEQ ID NO: 2104 - DNA, 17 bp, Homo sapiens
acgtgaacgagaaggaa

SEQ ID NO: 2105 - DNA, 17 bp, Homo sapiens
cgtgaacgagaaggaat

SEQ ID NO: 2106 - DNA, 17 bp, Homo sapiens
gtgaacgagaaggaatg

SEQ ID NO: 2107 - DNA, 17 bp, Homo sapiens
tgaacgagaaggaatgc

SEQ ID NO: 2108 - DNA, 17 bp, Homo sapiens
gaacgagaaggaatgcc

SEQ ID NO: 2109 - DNA, 17 bp, Homo sapiens
aacgagaaggaatgcct

SEQ ID NO: 2110 - DNA, 17 bp, Homo sapiens
acgagaaggaatgcctc

SEQ ID NO: 2111 - DNA, 17 bp, Homo sapiens
cgagaaggaatgcctca

SEQ ID NO: 2112 - DNA, 17 bp, Homo sapiens
gagaaggaatgcctcat

SEQ ID NO: 2113 - DNA, 17 bp, Homo sapiens
agaaggaatgcctcatg

SEQ ID NO: 2114 - DNA, 17 bp, Homo sapiens
gaaggaatgcctcatgc

SEQ ID NO: 2115 - DNA, 17 bp, Homo sapiens
aaggaatgcctcatgct

SEQ ID NO: 2116 - DNA, 17 bp, Homo sapiens
aggaatgcctcatgctc

SEQ ID NO: 2117 - DNA, 17 bp, Homo sapiens
ggaatgcctcatgctca

SEQ ID NO: 2118 - DNA, 17 bp, Homo sapiens
gaatgcctcatgctcaa

SEQ ID NO: 2119 - DNA, 17 bp, Homo sapiens
aatgcctcatgctcaag

SEQ ID NO: 2120 - DNA, 17 bp, Homo sapiens
atgcctcatgctcaagc

SEQ ID NO: 2121 - DNA, 17 bp, Homo sapiens
tgcctcatgctcaagca

SEQ ID NO: 2122 - DNA, 17 bp, Homo sapiens
gcctcatgctcaagcag

SEQ ID NO: 2123 - DNA, 17 bp, Homo sapiens
cctcatgctcaagcagc

SEQ ID NO: 2124 - DNA, 17 bp, Homo sapiens
ctcatgctcaagcagct

SEQ ID NO: 2125 - DNA, 17 bp, Homo sapiens
tcatgctcaagcagctc

SEQ ID NO: 2126 - DNA, 17 bp, Homo sapiens
catgctcaagcagctct

SEQ ID NO: 2127 - DNA, 17 bp, Homo sapiens
atgctcaagcagctctg

SEQ ID NO: 2128 - DNA, 17 bp, Homo sapiens
tgctcaagcagctctgg

SEQ ID NO: 2129 - DNA, 17 bp, Homo sapiens
gctcaagcagctctgga

SEQ ID NO: 2130 - DNA, 17 bp, Homo sapiens
ctcaagcagctctggag

SEQ ID NO: 2131 - DNA, 17 bp, Homo sapiens
tcaagcagctctggagc

SEQ ID NO: 2132 - DNA, 17 bp, Homo sapiens
caagcagctctggagct

SEQ ID NO: 2133 - DNA, 17 bp, Homo sapiens
aagcagctctggagctc

SEQ ID NO: 2134 - DNA, 17 bp, Homo sapiens
agcagctctggagctcc

SEQ ID NO: 2135 - DNA, 17 bp, Homo sapiens
gcagctctggagctcct

SEQ ID NO: 2136 - DNA, 17 bp, Homo sapiens
cagctctggagctcctc

SEQ ID NO: 2137 - DNA, 17 bp, Homo sapiens
agctctggagctcctcc

SEQ ID NO: 2138 - DNA, 17 bp, Homo sapiens
gctctggagctcctcca

SEQ ID NO: 2139 - DNA, 17 bp, Homo sapiens
ctctggagctcctccaa

SEQ ID NO: 2140 - DNA, 17 bp, Homo sapiens
tctggagctcctccaaa

SEQ ID NO: 2141 - DNA, 17 bp, Homo sapiens
ctggagctcctccaaag

SEQ ID NO: 2142 - DNA, 17 bp, Homo sapiens
tggagctcctccaaagg

SEQ ID NO: 2143 - DNA, 17 bp, Homo sapiens
ggagctcctccaaaggc

SEQ ID NO: 2144 - DNA, 17 bp, Homo sapiens
gagctcctccaaaggcc

SEQ ID NO: 2145 - DNA, 17 bp, Homo sapiens
agctcctccaaaggcct

SEQ ID NO: 2146 - DNA, 17 bp, Homo sapiens
gctcctccaaaggcctt

SEQ ID NO: 2147 - DNA, 17 bp, Homo sapiens
ctcctccaaaggccttg

SEQ ID NO: 2148 - DNA, 17 bp, Homo sapiens
tcctccaaaggccttga

SEQ ID NO: 2149 - DNA, 17 bp, Homo sapiens
cctccaaaggccttgac

SEQ ID NO: 2150 - DNA, 17 bp, Homo sapiens
ctccaaaggccttgact

SEQ ID NO: 2151 - DNA, 17 bp, Homo sapiens
tccaaaggccttgactc

SEQ ID NO: 2152 - DNA, 17 bp, Homo sapiens
ccaaaggccttgactcc

SEQ ID NO: 2153 - DNA, 17 bp, Homo sapiens
caaaggccttgactccc

SEQ ID NO: 2154 - DNA, 17 bp, Homo sapiens
aaaggccttgactccct

SEQ ID NO: 2155 - DNA, 17 bp, Homo sapiens
aaggccttgactccctt

SEQ ID NO: 2156 - DNA, 17 bp, Homo sapiens
aggccttgactcccttt

SEQ ID NO: 2157 - DNA, 17 bp, Homo sapiens
ggccttgactccctttt

SEQ ID NO: 2158 - DNA, 17 bp, Homo sapiens
gccttgactcccttttc

SEQ ID NO: 2159 - DNA, 17 bp, Homo sapiens
ccttgactcccttttca

SEQ ID NO: 2160 - DNA, 17 bp, Homo sapiens
cttgactcccttttcag

SEQ ID NO: 2161 - DNA, 17 bp, Homo sapiens
ttgactcccttttcagc

SEQ ID NO: 2162 - DNA, 17 bp, Homo sapiens
tgactcccttttcagct

SEQ ID NO: 2163 - DNA, 17 bp, Homo sapiens
gactcccttttcagcta

SEQ ID NO: 2164 - DNA, 17 bp, Homo sapiens
actcccttttcagctac

SEQ ID NO: 2165 - DNA, 17 bp, Homo sapiens
ctcccttttcagctacc

SEQ ID NO: 2166 - DNA, 17 bp, Homo sapiens
tcccttttcagctacct

SEQ ID NO: 2167 - DNA, 17 bp, Homo sapiens
cccttttcagctacctg

SEQ ID NO: 2168 - DNA, 17 bp, Homo sapiens
ccttttcagctacctgc

SEQ ID NO: 2169 - DNA, 17 bp, Homo sapiens
cttttcagctacctgca

SEQ ID NO: 2170 - DNA, 17 bp, Homo sapiens
ttttcagctacctgcag

SEQ ID NO: 2171 - DNA, 17 bp, Homo sapiens
tttcagctacctgcagg

SEQ ID NO: 2172 - DNA, 17 bp, Homo sapiens
ttcagctacctgcagga

SEQ ID NO: 2173 - DNA, 17 bp, Homo sapiens
tcagctacctgcaggac

SEQ ID NO: 2174 - DNA, 17 bp, Homo sapiens
cagctacctgcaggaca

SEQ ID NO: 2175 - DNA, 17 bp, Homo sapiens
agctacctgcaggacaa

SEQ ID NO: 2176 - DNA, 17 bp, Homo sapiens
gctacctgcaggacaaa

SEQ ID NO: 2177 - DNA, 17 bp, Homo sapiens
ctacctgcaggacaaaa

SEQ ID NO: 2178 - DNA, 17 bp, Homo sapiens
tacctgcaggacaaaat

SEQ ID NO: 2179 - DNA, 17 bp, Homo sapiens
acctgcaggacaaaatt

SEQ ID NO: 2180 - DNA, 17 bp, Homo sapiens
cctgcaggacaaaattt

SEQ ID NO: 2181 - DNA, 17 bp, Homo sapiens
ctgcaggacaaaattta

SEQ ID NO: 2182 - DNA, 17 bp, Homo sapiens
tgcaggacaaaatttat

SEQ ID NO: 2183 - DNA, 17 bp, Homo sapiens
gcaggacaaaatttatg

SEQ ID NO: 2184 - DNA, 17 bp, Homo sapiens
caggacaaaatttatga

SEQ ID NO: 2185 - DNA, 17 bp, Homo sapiens
aggacaaaatttatgaa

SEQ ID NO: 2186 - DNA, 17 bp, Homo sapiens
ggacaaaatttatgaag

SEQ ID NO: 2187 - DNA, 17 bp, Homo sapiens
gacaaaatttatgaagt

SEQ ID NO: 2188 - DNA, 17 bp, Homo sapiens
acaaaatttatgaagtc

SEQ ID NO: 2189 - DNA, 17 bp, Homo sapiens
caaaatttatgaagtct

SEQ ID NO: 2190 - DNA, 17 bp, Homo sapiens
aaaatttatgaagtctg

SEQ ID NO: 2191 - DNA, 17 bp, Homo sapiens
aaatttatgaagtctga

SEQ ID NO: 2192 - DNA, 17 bp, Homo sapiens
aatttatgaagtctgag

SEQ ID NO: 2193 - DNA, 17 bp, Homo sapiens
atttatgaagtctgagg

SEQ ID NO: 2194 - DNA, 17 bp, Homo sapiens
tttatgaagtctgaggg

SEQ ID NO: 2195 - DNA, 17 bp, Homo sapiens
ttatgaagtctgagggg

SEQ ID NO: 2196 - DNA, 17 bp, Homo sapiens
tatgaagtctgaggggc

SEQ ID NO: 2197 - DNA, 17 bp, Homo sapiens
atgaagtctgaggggcc

SEQ ID NO: 2198 - DNA, 17 bp, Homo sapiens
tgaagtctgaggggccc

SEQ ID NO: 2199 - DNA, 17 bp, Homo sapiens
gaagtctgaggggcccc

SEQ ID NO: 2200 - DNA, 17 bp, Homo sapiens
aagtctgaggggcccca

SEQ ID NO: 2201 - DNA, 17 bp, Homo sapiens
agtctgaggggccccag

SEQ ID NO: 2202 - DNA, 17 bp, Homo sapiens
gtctgaggggccccagc

SEQ ID NO: 2203 - DNA, 17 bp, Homo sapiens
tctgaggggccccagct

SEQ ID NO: 2204 - DNA, 17 bp, Homo sapiens
ctgaggggccccagctc

SEQ ID NO: 2205 - DNA, 17 bp, Homo sapiens
tgaggggccccagctca

SEQ ID NO: 2206 - DNA, 17 bp, Homo sapiens
gaggggccccagctcac

SEQ ID NO: 2207 - DNA, 17 bp, Homo sapiens
aggggccccagctcacg

SEQ ID NO: 2208 - DNA, 17 bp, Homo sapiens
ggggccccagctcacgg

SEQ ID NO: 2209 - DNA, 17 bp, Homo sapiens
gggccccagctcacggg

SEQ ID NO: 2210 - DNA, 17 bp, Homo sapiens
ggccccagctcacgggc

SEQ ID NO: 2211 - DNA, 17 bp, Homo sapiens
gccccagctcacgggcc

SEQ ID NO: 2212 - DNA, 17 bp, Homo sapiens
ccccagctcacgggccc

SEQ ID NO: 2213 - DNA, 17 bp, Homo sapiens
cccagctcacgggcccc

SEQ ID NO: 2214 - DNA, 17 bp, Homo sapiens
ccagctcacgggccccc

SEQ ID NO: 2215 - DNA, 17 bp, Homo sapiens
cagctcacgggccccca

SEQ ID NO: 2216 - DNA, 17 bp, Homo sapiens
agctcacgggcccccaa

SEQ ID NO: 2217 - DNA, 17 bp, Homo sapiens
gctcacgggcccccaac

SEQ ID NO: 2218 - DNA, 17 bp, Homo sapiens
ctcacgggcccccaact

SEQ ID NO: 2219 - DNA, 17 bp, Homo sapiens
tcacgggcccccaactt

SEQ ID NO: 2220 - DNA, 17 bp, Homo sapiens
cacgggcccccaacttc

SEQ ID NO: 2221 - DNA, 17 bp, Homo sapiens
acgggcccccaacttcc

SEQ ID NO: 2222 - DNA, 17 bp, Homo sapiens
cgggcccccaacttcca

SEQ ID NO: 2223 - DNA, 17 bp, Homo sapiens
gggcccccaacttccag

SEQ ID NO: 2224 - DNA, 17 bp, Homo sapiens
ggcccccaacttccagc

SEQ ID NO: 2225 - DNA, 17 bp, Homo sapiens
gcccccaacttccagct

SEQ ID NO: 2226 - DNA, 17 bp, Homo sapiens
cccccaacttccagctc

SEQ ID NO: 2227 - DNA, 17 bp, Homo sapiens
ccccaacttccagctct

SEQ ID NO: 2228 - DNA, 17 bp, Homo sapiens
cccaacttccagctctg

SEQ ID NO: 2229 - DNA, 17 bp, Homo sapiens
ccaacttccagctctgc

SEQ ID NO: 2230 - DNA, 17 bp, Homo sapiens
caacttccagctctgcc

SEQ ID NO: 2231 - DNA, 17 bp, Homo sapiens
aacttccagctctgccc

SEQ ID NO: 2232 - DNA, 17 bp, Homo sapiens
acttccagctctgccct

SEQ ID NO: 2233 - DNA, 17 bp, Homo sapiens
cttccagctctgccctg

SEQ ID NO: 2234 - DNA, 17 bp, Homo sapiens
ttccagctctgccctgt

SEQ ID NO: 2235 - DNA, 17 bp, Homo sapiens
tccagctctgccctgtg

SEQ ID NO: 2236 - DNA, 17 bp, Homo sapiens
ccagctctgccctgtgt

SEQ ID NO: 2237 - DNA, 17 bp, Homo sapiens
cagctctgccctgtgtt

SEQ ID NO: 2238 - DNA, 17 bp, Homo sapiens
agctctgccctgtgttt

SEQ ID NO: 2239 - DNA, 17 bp, Homo sapiens
gctctgccctgtgtttc

SEQ ID NO: 2240 - DNA, 17 bp, Homo sapiens
ctctgccctgtgtttcg

SEQ ID NO: 2241 - DNA, 17 bp, Homo sapiens
tctgccctgtgtttcgg

SEQ ID NO: 2242 - DNA, 17 bp, Homo sapiens
ctgccctgtgtttcgga

SEQ ID NO: 2243 - DNA, 17 bp, Homo sapiens
tgccctgtgtttcggaa

SEQ ID NO: 2244 - DNA, 17 bp, Homo sapiens
gccctgtgtttcggaaa

SEQ ID NO: 2245 - DNA, 17 bp, Homo sapiens
ccctgtgtttcggaaac

SEQ ID NO: 2246 - DNA, 17 bp, Homo sapiens
cctgtgtttcggaaacc

SEQ ID NO: 2247 - DNA, 17 bp, Homo sapiens
ctgtgtttcggaaacca

SEQ ID NO: 2248 - DNA, 17 bp, Homo sapiens
tgtgtttcggaaaccag

SEQ ID NO: 2249 - DNA, 17 bp, Homo sapiens
gtgtttcggaaaccaga

SEQ ID NO: 2250 - DNA, 17 bp, Homo sapiens
tgtttcggaaaccagag

SEQ ID NO: 2251 - DNA, 17 bp, Homo sapiens
gtttcggaaaccagagc

SEQ ID NO: 2252 - DNA, 17 bp, Homo sapiens
tttcggaaaccagagca

SEQ ID NO: 2253 - DNA, 17 bp, Homo sapiens
ttcggaaaccagagcac

SEQ ID NO: 2254 - DNA, 17 bp, Homo sapiens
tcggaaaccagagcaca

SEQ ID NO: 2255 - DNA, 17 bp, Homo sapiens
cggaaaccagagcacag

SEQ ID NO: 2256 - DNA, 17 bp, Homo sapiens
ggaaaccagagcacagt

SEQ ID NO: 2257 - DNA, 17 bp, Homo sapiens
gaaaccagagcacagtg

SEQ ID NO: 2258 - DNA, 17 bp, Homo sapiens
aaaccagagcacagtgt

SEQ ID NO: 2259 - DNA, 17 bp, Homo sapiens
aaccagagcacagtgtc

SEQ ID NO: 2260 - DNA, 17 bp, Homo sapiens
accagagcacagtgtct

SEQ ID NO: 2261 - DNA, 17 bp, Homo sapiens
ccagagcacagtgtctg

SEQ ID NO: 2262 - DNA, 17 bp, Homo sapiens
cagagcacagtgtctgc

SEQ ID NO: 2263 - DNA, 17 bp, Homo sapiens
agagcacagtgtctgcc

SEQ ID NO: 2264 - DNA, 17 bp, Homo sapiens
gagcacagtgtctgccc

SEQ ID NO: 2265 - DNA, 17 bp, Homo sapiens
agcacagtgtctgcccc

SEQ ID NO: 2266 - DNA, 17 bp, Homo sapiens
gcacagtgtctgccccg

SEQ ID NO: 2267 - DNA, 17 bp, Homo sapiens
cacagtgtctgccccgg

SEQ ID NO: 2268 - DNA, 17 bp, Homo sapiens
acagtgtctgccccggc

SEQ ID NO: 2269 - DNA, 17 bp, Homo sapiens
cagtgtctgccccggcc

SEQ ID NO: 2270 - DNA, 17 bp, Homo sapiens
agtgtctgccccggcca

SEQ ID NO: 2271 - DNA, 17 bp, Homo sapiens
gtgtctgccccggccaa

SEQ ID NO: 2272 - DNA, 17 bp, Homo sapiens
tgtctgccccggccaag

SEQ ID NO: 2273 - DNA, 17 bp, Homo sapiens
gtctgccccggccaagg

SEQ ID NO: 2274 - DNA, 17 bp, Homo sapiens
tctgccccggccaagga

SEQ ID NO: 2275 - DNA, 17 bp, Homo sapiens
ctgccccggccaaggag

SEQ ID NO: 2276 - DNA, 17 bp, Homo sapiens
tgccccggccaaggagt

SEQ ID NO: 2277 - DNA, 17 bp, Homo sapiens
gccccggccaaggagtt

SEQ ID NO: 2278 - DNA, 17 bp, Homo sapiens
ccccggccaaggagttt

SEQ ID NO: 2279 - DNA, 17 bp, Homo sapiens
cccggccaaggagtttg

SEQ ID NO: 2280 - DNA, 17 bp, Homo sapiens
ccggccaaggagtttgt

SEQ ID NO: 2281 - DNA, 17 bp, Homo sapiens
cggccaaggagtttgtc

SEQ ID NO: 2282 - DNA, 17 bp, Homo sapiens
ggccaaggagtttgtca

SEQ ID NO: 2283 - DNA, 17 bp, Homo sapiens
gccaaggagtttgtcaa

SEQ ID NO: 2284 - DNA, 17 bp, Homo sapiens
ccaaggagtttgtcaag

SEQ ID NO: 2285 - DNA, 17 bp, Homo sapiens
caaggagtttgtcaagg

SEQ ID NO: 2286 - DNA, 17 bp, Homo sapiens
aaggagtttgtcaaggt

SEQ ID NO: 2287 - DNA, 17 bp, Homo sapiens
aggagtttgtcaaggtg

SEQ ID NO: 2288 - DNA, 17 bp, Homo sapiens
ggagtttgtcaaggtgt

SEQ ID NO: 2289 - DNA, 17 bp, Homo sapiens
gagtttgtcaaggtgtc

SEQ ID NO: 2290 - DNA, 17 bp, Homo sapiens
agtttgtcaaggtgtct

SEQ ID NO: 2291 - DNA, 17 bp, Homo sapiens
gtttgtcaaggtgtctc

SEQ ID NO: 2292 - DNA, 17 bp, Homo sapiens
tttgtcaaggtgtctct

SEQ ID NO: 2293 - DNA, 17 bp, Homo sapiens
ttgtcaaggtgtctctt

SEQ ID NO: 2294 - DNA, 17 bp, Homo sapiens
tgtcaaggtgtctcttt

SEQ ID NO: 2295 - DNA, 17 bp, Homo sapiens
gtcaaggtgtctcttta

SEQ ID NO: 2296 - DNA, 17 bp, Homo sapiens
tcaaggtgtctctttat

SEQ ID NO: 2297 - DNA, 17 bp, Homo sapiens
caaggtgtctctttata

SEQ ID NO: 2298 - DNA, 17 bp, Homo sapiens
aaggtgtctctttatac

SEQ ID NO: 2299 - DNA, 17 bp, Homo sapiens
aggtgtctctttatacg

SEQ ID NO: 2300 - DNA, 17 bp, Homo sapiens
ggtgtctctttatacgt

SEQ ID NO: 2301 - DNA, 17 bp, Homo sapiens
gtgtctctttatacgta

SEQ ID NO: 2302 - DNA, 17 bp, Homo sapiens
tgtctctttatacgtag

SEQ ID NO: 2303 - DNA, 17 bp, Homo sapiens
gtctctttatacgtagg

SEQ ID NO: 2304 - DNA, 17 bp, Homo sapiens
tctctttatacgtaggg

SEQ ID NO: 2305 - DNA, 17 bp, Homo sapiens
ctctttatacgtagggt

SEQ ID NO: 2306 - DNA, 17 bp, Homo sapiens
tctttatacgtagggtt

SEQ ID NO: 2307 - DNA, 17 bp, Homo sapiens
ctttatacgtagggttg

SEQ ID NO: 2308 - DNA, 17 bp, Homo sapiens
tttatacgtagggttgt

SEQ ID NO: 2309 - DNA, 17 bp, Homo sapiens
ttatacgtagggttgtg

SEQ ID NO: 2310 - DNA, 17 bp, Homo sapiens
tatacgtagggttgtgt

SEQ ID NO: 2311 - DNA, 17 bp, Homo sapiens
atacgtagggttgtgtc

SEQ ID NO: 2312 - DNA, 17 bp, Homo sapiens
tacgtagggttgtgtcc

SEQ ID NO: 2313 - DNA, 17 bp, Homo sapiens
acgtagggttgtgtcca

SEQ ID NO: 2314 - DNA, 17 bp, Homo sapiens
cgtagggttgtgtccat

SEQ ID NO: 2315 - DNA, 17 bp, Homo sapiens
gtagggttgtgtccatt

SEQ ID NO: 2316 - DNA, 17 bp, Homo sapiens
tagggttgtgtccattt

SEQ ID NO: 2317 - DNA, 17 bp, Homo sapiens
agggttgtgtccatttc

SEQ ID NO: 2318 - DNA, 17 bp, Homo sapiens
gggttgtgtccatttcc

SEQ ID NO: 2319 - DNA, 17 bp, Homo sapiens
ggttgtgtccatttcct

SEQ ID NO: 2320 - DNA, 17 bp, Homo sapiens
gttgtgtccatttcctc

SEQ ID NO: 2321 - DNA, 17 bp, Homo sapiens
ttgtgtccatttcctcg

SEQ ID NO: 2322 - DNA, 17 bp, Homo sapiens
tgtgtccatttcctcgt

SEQ ID NO: 2323 - DNA, 17 bp, Homo sapiens
gtgtccatttcctcgtg

SEQ ID NO: 2324 - DNA, 17 bp, Homo sapiens
tgtccatttcctcgtgt

SEQ ID NO: 2325 - DNA, 17 bp, Homo sapiens
gtccatttcctcgtgtc

SEQ ID NO: 2326 - DNA, 17 bp, Homo sapiens
tccatttcctcgtgtcc

SEQ ID NO: 2327 - DNA, 17 bp, Homo sapiens
ccatttcctcgtgtcct

SEQ ID NO: 2328 - DNA, 17 bp, Homo sapiens
catttcctcgtgtcctt

SEQ ID NO: 2329 - DNA, 17 bp, Homo sapiens
atttcctcgtgtccttt

SEQ ID NO: 2330 - DNA, 17 bp, Homo sapiens
tttcctcgtgtcctttg

SEQ ID NO: 2331 - DNA, 17 bp, Homo sapiens
ttcctcgtgtcctttgg

SEQ ID NO: 2332 - DNA, 17 bp, Homo sapiens
tcctcgtgtcctttggt

SEQ ID NO: 2333 - DNA, 17 bp, Homo sapiens
cctcgtgtcctttggtt

SEQ ID NO: 2334 - DNA, 17 bp, Homo sapiens
ctcgtgtcctttggttg

SEQ ID NO: 2335 - DNA, 17 bp, Homo sapiens
tcgtgtcctttggttgc

SEQ ID NO: 2336 - DNA, 17 bp, Homo sapiens
cgtgtcctttggttgct

SEQ ID NO: 2337 - DNA, 17 bp, Homo sapiens
gtgtcctttggttgctc

SEQ ID NO: 2338 - DNA, 17 bp, Homo sapiens
tgtcctttggttgctcc

SEQ ID NO: 2339 - DNA, 17 bp, Homo sapiens
gtcctttggttgctcct

SEQ ID NO: 2340 - DNA, 17 bp, Homo sapiens
tcctttggttgctcctc

SEQ ID NO: 2341 - DNA, 17 bp, Homo sapiens
cctttggttgctcctcc

SEQ ID NO: 2342 - DNA, 17 bp, Homo sapiens
ctttggttgctcctcct

SEQ ID NO: 2343 - DNA, 17 bp, Homo sapiens
tttggttgctcctcctt

SEQ ID NO: 2344 - DNA, 17 bp, Homo sapiens
ttggttgctcctccttg

SEQ ID NO: 2345 - DNA, 17 bp, Homo sapiens
tggttgctcctccttgg

SEQ ID NO: 2346 - DNA, 17 bp, Homo sapiens
ggttgctcctccttggt

SEQ ID NO: 2347 - DNA, 17 bp, Homo sapiens
gttgctcctccttggtt

SEQ ID NO: 2348 - DNA, 17 bp, Homo sapiens
ttgctcctccttggttt

SEQ ID NO: 2349 - DNA, 17 bp, Homo sapiens
tgctcctccttggtttg

SEQ ID NO: 2350 - DNA, 17 bp, Homo sapiens
gctcctccttggtttga

SEQ ID NO: 2351 - DNA, 17 bp, Homo sapiens
ctcctccttggtttgat

SEQ ID NO: 2352 - DNA, 17 bp, Homo sapiens
tcctccttggtttgatt

SEQ ID NO: 2353 - DNA, 17 bp, Homo sapiens
cctccttggtttgattt

SEQ ID NO: 2354 - DNA, 17 bp, Homo sapiens
ctccttggtttgatttt

SEQ ID NO: 2355 - DNA, 17 bp, Homo sapiens
tccttggtttgattttg

SEQ ID NO: 2356 - DNA, 17 bp, Homo sapiens
ccttggtttgattttgt

SEQ ID NO: 2357 - DNA, 17 bp, Homo sapiens
cttggtttgattttgtg

SEQ ID NO: 2358 - DNA, 17 bp, Homo sapiens
ttggtttgattttgtgt

SEQ ID NO: 2359 - DNA, 17 bp, Homo sapiens
tggtttgattttgtgta

SEQ ID NO: 2360 - DNA, 17 bp, Homo sapiens
ggtttgattttgtgtaa

SEQ ID NO: 2361 - DNA, 17 bp, Homo sapiens
gtttgattttgtgtaat

SEQ ID NO: 2362 - DNA, 17 bp, Homo sapiens
tttgattttgtgtaatg

SEQ ID NO: 2363 - DNA, 17 bp, Homo sapiens
ttgattttgtgtaatgg

SEQ ID NO: 2364 - DNA, 17 bp, Homo sapiens
tgattttgtgtaatgga

SEQ ID NO: 2365 - DNA, 17 bp, Homo sapiens
gattttgtgtaatggat

SEQ ID NO: 2366 - DNA, 17 bp, Homo sapiens
attttgtgtaatggatg

SEQ ID NO: 2367 - DNA, 17 bp, Homo sapiens
ttttgtgtaatggatgg

SEQ ID NO: 2368 - DNA, 17 bp, Homo sapiens
tttgtgtaatggatgga

SEQ ID NO: 2369 - DNA, 17 bp, Homo sapiens
ttgtgtaatggatggaa

SEQ ID NO: 2370 - DNA, 17 bp, Homo sapiens
tgtgtaatggatggaaa

SEQ ID NO: 2371 - DNA, 17 bp, Homo sapiens
gtgtaatggatggaaaa

SEQ ID NO: 2372 - DNA, 17 bp, Homo sapiens
tgtaatggatggaaaac

SEQ ID NO: 2373 - DNA, 17 bp, Homo sapiens
gtaatggatggaaaacg

SEQ ID NO: 2374 - DNA, 17 bp, Homo sapiens
taatggatggaaaacgc

SEQ ID NO: 2375 - DNA, 17 bp, Homo sapiens
aatggatggaaaacgca

SEQ ID NO: 2376 - DNA, 17 bp, Homo sapiens
atggatggaaaacgcag

SEQ ID NO: 2377 - DNA, 17 bp, Homo sapiens
tggatggaaaacgcagc

SEQ ID NO: 2378 - DNA, 17 bp, Homo sapiens
ggatggaaaacgcagca

SEQ ID NO: 2379 - DNA, 17 bp, Homo sapiens
gatggaaaacgcagcat

SEQ ID NO: 2380 - DNA, 17 bp, Homo sapiens
atggaaaacgcagcata

SEQ ID NO: 2381 - DNA, 17 bp, Homo sapiens
tggaaaacgcagcatac

SEQ ID NO: 2382 - DNA, 17 bp, Homo sapiens
ggaaaacgcagcatact

SEQ ID NO: 2383 - DNA, 17 bp, Homo sapiens
gaaaacgcagcatactt

SEQ ID NO: 2384 - DNA, 17 bp, Homo sapiens
aaaacgcagcatacttg

SEQ ID NO: 2385 - DNA, 17 bp, Homo sapiens
aaacgcagcatacttgg

SEQ ID NO: 2386 - DNA, 17 bp, Homo sapiens
aacgcagcatacttggc

SEQ ID NO: 2387 - DNA, 17 bp, Homo sapiens
acgcagcatacttggcc

SEQ ID NO: 2388 - DNA, 17 bp, Homo sapiens
cgcagcatacttggcct

SEQ ID NO: 2389 - DNA, 17 bp, Homo sapiens
gcagcatacttggcctc

SEQ ID NO: 2390 - DNA, 17 bp, Homo sapiens
cagcatacttggcctcc

SEQ ID NO: 2391 - DNA, 17 bp, Homo sapiens
agcatacttggcctccc

SEQ ID NO: 2392 - DNA, 17 bp, Homo sapiens
gcatacttggcctcccc

SEQ ID NO: 2393 - DNA, 17 bp, Homo sapiens
catacttggcctccccc

SEQ ID NO: 2394 - DNA, 17 bp, Homo sapiens
atacttggcctccccca

SEQ ID NO: 2395 - DNA, 17 bp, Homo sapiens
tacttggcctcccccac

SEQ ID NO: 2396 - DNA, 17 bp, Homo sapiens
acttggcctcccccacc

SEQ ID NO: 2397 - DNA, 17 bp, Homo sapiens
cttggcctcccccacct

SEQ ID NO: 2398 - DNA, 17 bp, Homo sapiens
ttggcctcccccacctc

SEQ ID NO: 2399 - DNA, 17 bp, Homo sapiens
tggcctcccccacctcc

SEQ ID NO: 2400 - DNA, 17 bp, Homo sapiens
ggcctcccccacctccc

SEQ ID NO: 2401 - DNA, 17 bp, Homo sapiens
gcctcccccacctccct

SEQ ID NO: 2402 - DNA, 17 bp, Homo sapiens
cctcccccacctccctg

SEQ ID NO: 2403 - DNA, 17 bp, Homo sapiens
ctcccccacctccctgc

SEQ ID NO: 2404 - DNA, 17 bp, Homo sapiens
tcccccacctccctgcc

SEQ ID NO: 2405 - DNA, 17 bp, Homo sapiens
cccccacctccctgccc

SEQ ID NO: 2406 - DNA, 17 bp, Homo sapiens
ccccacctccctgccct

SEQ ID NO: 2407 - DNA, 17 bp, Homo sapiens
cccacctccctgccctt

SEQ ID NO: 2408 - DNA, 17 bp, Homo sapiens
ccacctccctgcccttc

SEQ ID NO: 2409 - DNA, 17 bp, Homo sapiens
cacctccctgcccttcc

SEQ ID NO: 2410 - DNA, 17 bp, Homo sapiens
acctccctgcccttcct

SEQ ID NO: 2411 - DNA, 17 bp, Homo sapiens
cctccctgcccttcctg

SEQ ID NO: 2412 - DNA, 17 bp, Homo sapiens
ctccctgcccttcctgg

SEQ ID NO: 2413 - DNA, 17 bp, Homo sapiens
tccctgcccttcctggc

SEQ ID NO: 2414 - DNA, 17 bp, Homo sapiens
ccctgcccttcctggcc

SEQ ID NO: 2415 - DNA, 17 bp, Homo sapiens
cctgcccttcctggcca

SEQ ID NO: 2416 - DNA, 17 bp, Homo sapiens
ctgcccttcctggccag

SEQ ID NO: 2417 - DNA, 17 bp, Homo sapiens
tgcccttcctggccaga

SEQ ID NO: 2418 - DNA, 17 bp, Homo sapiens
gcccttcctggccagag

SEQ ID NO: 2419 - DNA, 25 bp, Homo sapiens
atcatgaaagaagtccggcgagcgc

SEQ ID NO: 2420 - DNA, 25 bp, Homo sapiens
tcatgaaagaagtccggcgagcgct

SEQ ID NO: 2421 - DNA, 25 bp, Homo sapiens
catgaaagaagtccggcgagcgctc

SEQ ID NO: 2422 - DNA, 25 bp, Homo sapiens
atgaaagaagtccggcgagcgctct

SEQ ID NO: 2423 - DNA, 25 bp, Homo sapiens
tgaaagaagtccggcgagcgctctg

SEQ ID NO: 2424 - DNA, 25 bp, Homo sapiens
gaaagaagtccggcgagcgctctgc

SEQ ID NO: 2425 - DNA, 25 bp, Homo sapiens
aaagaagtccggcgagcgctctgca

SEQ ID NO: 2426 - DNA, 25 bp, Homo sapiens
aagaagtccggcgagcgctctgcaa

SEQ ID NO: 2427 - DNA, 25 bp, Homo sapiens
agaagtccggcgagcgctctgcaac

SEQ ID NO: 2428 - DNA, 25 bp, Homo sapiens
gaagtccggcgagcgctctgcaacg

SEQ ID NO: 2429 - DNA, 25 bp, Homo sapiens
aagtccggcgagcgctctgcaacgc

SEQ ID NO: 2430 - DNA, 25 bp, Homo sapiens
agtccggcgagcgctctgcaacgca

SEQ ID NO: 2431 - DNA, 25 bp, Homo sapiens
gtccggcgagcgctctgcaacgcag

SEQ ID NO: 2432 - DNA, 25 bp, Homo sapiens
tccggcgagcgctctgcaacgcagc

SEQ ID NO: 2433 - DNA, 25 bp, Homo sapiens
ccggcgagcgctctgcaacgcagcc

SEQ ID NO: 2434 - DNA, 25 bp, Homo sapiens
cggcgagcgctctgcaacgcagcca

SEQ ID NO: 2435 - DNA, 25 bp, Homo sapiens
ggcgagcgctctgcaacgcagccac

SEQ ID NO: 2436 - DNA, 25 bp, Homo sapiens
gcgagcgctctgcaacgcagccaca

SEQ ID NO: 2437 - DNA, 25 bp, Homo sapiens
cgagcgctctgcaacgcagccacag

SEQ ID NO: 2438 - DNA, 25 bp, Homo sapiens
gagcgctctgcaacgcagccacaga

SEQ ID NO: 2439 - DNA, 25 bp, Homo sapiens
agcgctctgcaacgcagccacagac

SEQ ID NO: 2440 - DNA, 25 bp, Homo sapiens
gcgctctgcaacgcagccacagacg

SEQ ID NO: 2441 - DNA, 25 bp, Homo sapiens
cgctctgcaacgcagccacagacga

SEQ ID NO: 2442 - DNA, 25 bp, Homo sapiens
gctctgcaacgcagccacagacgac

SEQ ID NO: 2443 - DNA, 25 bp, Homo sapiens
ctctgcaacgcagccacagacgaca

SEQ ID NO: 2444 - DNA, 25 bp, Homo sapiens
tctgcaacgcagccacagacgacag

SEQ ID NO: 2445 - DNA, 25 bp, Homo sapiens
ctgcaacgcagccacagacgacagc

SEQ ID NO: 2446 - DNA, 25 bp, Homo sapiens
tgcaacgcagccacagacgacagca

SEQ ID NO: 2447 - DNA, 25 bp, Homo sapiens
gcaacgcagccacagacgacagcaa

SEQ ID NO: 2448 - DNA, 25 bp, Homo sapiens
caacgcagccacagacgacagcaaa

SEQ ID NO: 2449 - DNA, 25 bp, Homo sapiens
aacgcagccacagacgacagcaaac

SEQ ID NO: 2450 - DNA, 25 bp, Homo sapiens
acgcagccacagacgacagcaaact

SEQ ID NO: 2451 - DNA, 25 bp, Homo sapiens
cgcagccacagacgacagcaaactg

SEQ ID NO: 2452 - DNA, 25 bp, Homo sapiens
gcagccacagacgacagcaaactgc

SEQ ID NO: 2453 - DNA, 25 bp, Homo sapiens
cagccacagacgacagcaaactgct

SEQ ID NO: 2454 - DNA, 25 bp, Homo sapiens
agccacagacgacagcaaactgctg

SEQ ID NO: 2455 - DNA, 25 bp, Homo sapiens
gccacagacgacagcaaactgctgc

SEQ ID NO: 2456 - DNA, 25 bp, Homo sapiens
ccacagacgacagcaaactgctgct

SEQ ID NO: 2457 - DNA, 25 bp, Homo sapiens
cacagacgacagcaaactgctgctc

SEQ ID NO: 2458 - DNA, 25 bp, Homo sapiens
acagacgacagcaaactgctgctcc

SEQ ID NO: 2459 - DNA, 25 bp, Homo sapiens
cagacgacagcaaactgctgctcct

SEQ ID NO: 2460 - DNA, 25 bp, Homo sapiens
agacgacagcaaactgctgctcctc

SEQ ID NO: 2461 - DNA, 25 bp, Homo sapiens
gacgacagcaaactgctgctcctca

SEQ ID NO: 2462 - DNA, 25 bp, Homo sapiens
acgacagcaaactgctgctcctcag

SEQ ID NO: 2463 - DNA, 25 bp, Homo sapiens
cgacagcaaactgctgctcctcagc

SEQ ID NO: 2464 - DNA, 25 bp, Homo sapiens
gacagcaaactgctgctcctcagcg

SEQ ID NO: 2465 - DNA, 25 bp, Homo sapiens
acagcaaactgctgctcctcagcgc

SEQ ID NO: 2466 - DNA, 25 bp, Homo sapiens
cagcaaactgctgctcctcagcgca

SEQ ID NO: 2467 - DNA, 25 bp, Homo sapiens
agcaaactgctgctcctcagcgcag

SEQ ID NO: 2468 - DNA, 25 bp, Homo sapiens
gcaaactgctgctcctcagcgcagt

SEQ ID NO: 2469 - DNA, 25 bp, Homo sapiens
caaactgctgctcctcagcgcagtg

SEQ ID NO: 2470 - DNA, 25 bp, Homo sapiens
aaactgctgctcctcagcgcagtgg

SEQ ID NO: 2471 - DNA, 25 bp, Homo sapiens
aactgctgctcctcagcgcagtggg

SEQ ID NO: 2472 - DNA, 25 bp, Homo sapiens
actgctgctcctcagcgcagtgggg

SEQ ID NO: 2473 - DNA, 25 bp, Homo sapiens
ctgctgctcctcagcgcagtgggga

SEQ ID NO: 2474 - DNA, 25 bp, Homo sapiens
tgctgctcctcagcgcagtggggag

SEQ ID NO: 2475 - DNA, 25 bp, Homo sapiens
gctgctcctcagcgcagtggggagc

SEQ ID NO: 2476 - DNA, 25 bp, Homo sapiens
ctgctcctcagcgcagtggggagcg

SEQ ID NO: 2477 - DNA, 25 bp, Homo sapiens
tgctcctcagcgcagtggggagcgt

SEQ ID NO: 2478 - DNA, 25 bp, Homo sapiens
gctcctcagcgcagtggggagcgtg

SEQ ID NO: 2479 - DNA, 25 bp, Homo sapiens
ctcctcagcgcagtggggagcgtgt

SEQ ID NO: 2480 - DNA, 25 bp, Homo sapiens
tcctcagcgcagtggggagcgtgtt

SEQ ID NO: 2481 - DNA, 25 bp, Homo sapiens
cctcagcgcagtggggagcgtgttc

SEQ ID NO: 2482 - DNA, 25 bp, Homo sapiens
ctcagcgcagtggggagcgtgttct

SEQ ID NO: 2483 - DNA, 25 bp, Homo sapiens
tcagcgcagtggggagcgtgttctg

SEQ ID NO: 2484 - DNA, 25 bp, Homo sapiens
cagcgcagtggggagcgtgttctgc

SEQ ID NO: 2485 - DNA, 25 bp, Homo sapiens
agcgcagtggggagcgtgttctgca

SEQ ID NO: 2486 - DNA, 25 bp, Homo sapiens
gcgcagtggggagcgtgttctgcag

SEQ ID NO: 2487 - DNA, 25 bp, Homo sapiens
cgcagtggggagcgtgttctgcagc

SEQ ID NO: 2488 - DNA, 25 bp, Homo sapiens
gcagtggggagcgtgttctgcagcg

SEQ ID NO: 2489 - DNA, 25 bp, Homo sapiens
cagtggggagcgtgttctgcagcgg

SEQ ID NO: 2490 - DNA, 25 bp, Homo sapiens
agtggggagcgtgttctgcagcggc

SEQ ID NO: 2491 - DNA, 25 bp, Homo sapiens
gtggggagcgtgttctgcagcggcc

SEQ ID NO: 2492 - DNA, 25 bp, Homo sapiens
tggggagcgtgttctgcagcggcct

SEQ ID NO: 2493 - DNA, 25 bp, Homo sapiens
ggggagcgtgttctgcagcggcctg

SEQ ID NO: 2494 - DNA, 25 bp, Homo sapiens
gggagcgtgttctgcagcggcctgg

SEQ ID NO: 2495 - DNA, 25 bp, Homo sapiens
ggagcgtgttctgcagcggcctgga

SEQ ID NO: 2496 - DNA, 25 bp, Homo sapiens
gagcgtgttctgcagcggcctggat

SEQ ID NO: 2497 - DNA, 25 bp, Homo sapiens
agcgtgttctgcagcggcctggatt

SEQ ID NO: 2498 - DNA, 25 bp, Homo sapiens
gcgtgttctgcagcggcctggatta

SEQ ID NO: 2499 - DNA, 25 bp, Homo sapiens
cgtgttctgcagcggcctggattat

SEQ ID NO: 2500 - DNA, 25 bp, Homo sapiens
gtgttctgcagcggcctggattatt

SEQ ID NO: 2501 - DNA, 25 bp, Homo sapiens
tgttctgcagcggcctggattattc

SEQ ID NO: 2502 - DNA, 25 bp, Homo sapiens
gttctgcagcggcctggattattcc

SEQ ID NO: 2503 - DNA, 25 bp, Homo sapiens
ttctgcagcggcctggattattcct

SEQ ID NO: 2504 - DNA, 25 bp, Homo sapiens
tctgcagcggcctggattattccta

SEQ ID NO: 2505 - DNA, 25 bp, Homo sapiens
ctgcagcggcctggattattcctac

SEQ ID NO: 2506 - DNA, 25 bp, Homo sapiens
tgcagcggcctggattattcctacc

SEQ ID NO: 2507 - DNA, 25 bp, Homo sapiens
gcagcggcctggattattcctacct

SEQ ID NO: 2508 - DNA, 25 bp, Homo sapiens
cagcggcctggattattcctaccta

SEQ ID NO: 2509 - DNA, 25 bp, Homo sapiens
agcggcctggattattcctacctaa

SEQ ID NO: 2510 - DNA, 25 bp, Homo sapiens
gcggcctggattattcctacctaat

SEQ ID NO: 2511 - DNA, 25 bp, Homo sapiens
cggcctggattattcctacctaatt

SEQ ID NO: 2512 - DNA, 25 bp, Homo sapiens
ggcctggattattcctacctaattg

SEQ ID NO: 2513 - DNA, 25 bp, Homo sapiens
gcctggattattcctacctaattgg

SEQ ID NO: 2514 - DNA, 25 bp, Homo sapiens
cctggattattcctacctaattggc

SEQ ID NO: 2515 - DNA, 25 bp, Homo sapiens
ctggattattcctacctaattggcc

SEQ ID NO: 2516 - DNA, 25 bp, Homo sapiens
tggattattcctacctaattggccg

SEQ ID NO: 2517 - DNA, 25 bp, Homo sapiens
ggattattcctacctaattggccgg

SEQ ID NO: 2518 - DNA, 25 bp, Homo sapiens
gattattcctacctaattggccggt

SEQ ID NO: 2519 - DNA, 25 bp, Homo sapiens
attattcctacctaattggccggtt

SEQ ID NO: 2520 - DNA, 25 bp, Homo sapiens
ttattcctacctaattggccggttg

SEQ ID NO: 2521 - DNA, 25 bp, Homo sapiens
tattcctacctaattggccggttgt

SEQ ID NO: 2522 - DNA, 25 bp, Homo sapiens
attcctacctaattggccggttgtc

SEQ ID NO: 2523 - DNA, 25 bp, Homo sapiens
ttcctacctaattggccggttgtcc

SEQ ID NO: 2524 - DNA, 25 bp, Homo sapiens
tcctacctaattggccggttgtcca

SEQ ID NO: 2525 - DNA, 25 bp, Homo sapiens
cctacctaattggccggttgtccag

SEQ ID NO: 2526 - DNA, 25 bp, Homo sapiens
ctacctaattggccggttgtccagc

SEQ ID NO: 2527 - DNA, 25 bp, Homo sapiens
tacctaattggccggttgtccagcg

SEQ ID NO: 2528 - DNA, 25 bp, Homo sapiens
acctaattggccggttgtccagcga

SEQ ID NO: 2529 - DNA, 25 bp, Homo sapiens
cctaattggccggttgtccagcgac

SEQ ID NO: 2530 - DNA, 25 bp, Homo sapiens
ctaattggccggttgtccagcgacc

SEQ ID NO: 2531 - DNA, 25 bp, Homo sapiens
taattggccggttgtccagcgaccg

SEQ ID NO: 2532 - DNA, 25 bp, Homo sapiens
aattggccggttgtccagcgaccgg

SEQ ID NO: 2533 - DNA, 25 bp, Homo sapiens
attggccggttgtccagcgaccggc

SEQ ID NO: 2534 - DNA, 25 bp, Homo sapiens
ttggccggttgtccagcgaccggcg

SEQ ID NO: 2535 - DNA, 25 bp, Homo sapiens
tggccggttgtccagcgaccggcga

SEQ ID NO: 2536 - DNA, 25 bp, Homo sapiens
ggccggttgtccagcgaccggcgaa

SEQ ID NO: 2537 - DNA, 25 bp, Homo sapiens
gccggttgtccagcgaccggcgaaa

SEQ ID NO: 2538 - DNA, 25 bp, Homo sapiens
ccggttgtccagcgaccggcgaaag

SEQ ID NO: 2539 - DNA, 25 bp, Homo sapiens
cggttgtccagcgaccggcgaaagg

SEQ ID NO: 2540 - DNA, 25 bp, Homo sapiens
ggttgtccagcgaccggcgaaagga

SEQ ID NO: 2541 - DNA, 25 bp, Homo sapiens
gttgtccagcgaccggcgaaaggag

SEQ ID NO: 2542 - DNA, 25 bp, Homo sapiens
ttgtccagcgaccggcgaaaggaga

SEQ ID NO: 2543 - DNA, 25 bp, Homo sapiens
tgtccagcgaccggcgaaaggagag

SEQ ID NO: 2544 - DNA, 25 bp, Homo sapiens
gtccagcgaccggcgaaaggagagc

SEQ ID NO: 2545 - DNA, 25 bp, Homo sapiens
tccagcgaccggcgaaaggagagca

SEQ ID NO: 2546 - DNA, 25 bp, Homo sapiens
ccagcgaccggcgaaaggagagcac

SEQ ID NO: 2547 - DNA, 25 bp, Homo sapiens
cagcgaccggcgaaaggagagcact

SEQ ID NO: 2548 - DNA, 25 bp, Homo sapiens
agcgaccggcgaaaggagagcactc

SEQ ID NO: 2549 - DNA, 25 bp, Homo sapiens
gcgaccggcgaaaggagagcactcg

SEQ ID NO: 2550 - DNA, 25 bp, Homo sapiens
cgaccggcgaaaggagagcactcgg

SEQ ID NO: 2551 - DNA, 25 bp, Homo sapiens
gaccggcgaaaggagagcactcgga

SEQ ID NO: 2552 - DNA, 25 bp, Homo sapiens
accggcgaaaggagagcactcggat

SEQ ID NO: 2553 - DNA, 25 bp, Homo sapiens
ccggcgaaaggagagcactcggatt

SEQ ID NO: 2554 - DNA, 25 bp, Homo sapiens
cggcgaaaggagagcactcggattg

SEQ ID NO: 2555 - DNA, 25 bp, Homo sapiens
ggcgaaaggagagcactcggattgc

SEQ ID NO: 2556 - DNA, 25 bp, Homo sapiens
gcgaaaggagagcactcggattgca

SEQ ID NO: 2557 - DNA, 25 bp, Homo sapiens
cgaaaggagagcactcggattgcag

SEQ ID NO: 2558 - DNA, 25 bp, Homo sapiens
gaaaggagagcactcggattgcaga

SEQ ID NO: 2559 - DNA, 25 bp, Homo sapiens
aaaggagagcactcggattgcagaa

SEQ ID NO: 2560 - DNA, 25 bp, Homo sapiens
aaggagagcactcggattgcagaag

SEQ ID NO: 2561 - DNA, 25 bp, Homo sapiens
aggagagcactcggattgcagaagc

SEQ ID NO: 2562 - DNA, 25 bp, Homo sapiens
ggagagcactcggattgcagaagcc

SEQ ID NO: 2563 - DNA, 25 bp, Homo sapiens
gagagcactcggattgcagaagcca

SEQ ID NO: 2564 - DNA, 25 bp, Homo sapiens
agagcactcggattgcagaagccat

SEQ ID NO: 2565 - DNA, 25 bp, Homo sapiens
gagcactcggattgcagaagccatc

SEQ ID NO: 2566 - DNA, 25 bp, Homo sapiens
agcactcggattgcagaagccatca

SEQ ID NO: 2567 - DNA, 25 bp, Homo sapiens
gcactcggattgcagaagccatcag

SEQ ID NO: 2568 - DNA, 25 bp, Homo sapiens
cactcggattgcagaagccatcagg

SEQ ID NO: 2569 - DNA, 25 bp, Homo sapiens
actcggattgcagaagccatcaggg

SEQ ID NO: 2570 - DNA, 25 bp, Homo sapiens
ctcggattgcagaagccatcaggga

SEQ ID NO: 2571 - DNA, 25 bp, Homo sapiens
tcggattgcagaagccatcagggac

SEQ ID NO: 2572 - DNA, 25 bp, Homo sapiens
cggattgcagaagccatcagggact

SEQ ID NO: 2573 - DNA, 25 bp, Homo sapiens
ggattgcagaagccatcagggactt

SEQ ID NO: 2574 - DNA, 25 bp, Homo sapiens
gattgcagaagccatcagggacttt

SEQ ID NO: 2575 - DNA, 25 bp, Homo sapiens
attgcagaagccatcagggactttg

SEQ ID NO: 2576 - DNA, 25 bp, Homo sapiens
ttgcagaagccatcagggactttgt

SEQ ID NO: 2577 - DNA, 25 bp, Homo sapiens
tgcagaagccatcagggactttgtg

SEQ ID NO: 2578 - DNA, 25 bp, Homo sapiens
gcagaagccatcagggactttgtga

SEQ ID NO: 2579 - DNA, 25 bp, Homo sapiens
cagaagccatcagggactttgtgaa

SEQ ID NO: 2580 - DNA, 25 bp, Homo sapiens
agaagccatcagggactttgtgaag

SEQ ID NO: 2581 - DNA, 25 bp, Homo sapiens
gaagccatcagggactttgtgaagg

SEQ ID NO: 2582 - DNA, 25 bp, Homo sapiens
aagccatcagggactttgtgaaggc

SEQ ID NO: 2583 - DNA, 25 bp, Homo sapiens
agccatcagggactttgtgaaggcc

SEQ ID NO: 2584 - DNA, 25 bp, Homo sapiens
gccatcagggactttgtgaaggcct

SEQ ID NO: 2585 - DNA, 25 bp, Homo sapiens
ccatcagggactttgtgaaggcctt

SEQ ID NO: 2586 - DNA, 25 bp, Homo sapiens
catcagggactttgtgaaggccttt

SEQ ID NO: 2587 - DNA, 25 bp, Homo sapiens
atcagggactttgtgaaggccttta

SEQ ID NO: 2588 - DNA, 25 bp, Homo sapiens
tcagggactttgtgaaggcctttat

SEQ ID NO: 2589 - DNA, 25 bp, Homo sapiens
cagggactttgtgaaggcctttatc

SEQ ID NO: 2590 - DNA, 25 bp, Homo sapiens
agggactttgtgaaggcctttatcc

SEQ ID NO: 2591 - DNA, 25 bp, Homo sapiens
gggactttgtgaaggcctttatcca

SEQ ID NO: 2592 - DNA, 25 bp, Homo sapiens
ggactttgtgaaggcctttatccag

SEQ ID NO: 2593 - DNA, 25 bp, Homo sapiens
gactttgtgaaggcctttatccagt

SEQ ID NO: 2594 - DNA, 25 bp, Homo sapiens
actttgtgaaggcctttatccagtt

SEQ ID NO: 2595 - DNA, 25 bp, Homo sapiens
ctttgtgaaggcctttatccagttt

SEQ ID NO: 2596 - DNA, 25 bp, Homo sapiens
tttgtgaaggcctttatccagttta

SEQ ID NO: 2597 - DNA, 25 bp, Homo sapiens
ttgtgaaggcctttatccagtttaa

SEQ ID NO: 2598 - DNA, 25 bp, Homo sapiens
tgtgaaggcctttatccagtttaag

SEQ ID NO: 2599 - DNA, 25 bp, Homo sapiens
gtgaaggcctttatccagtttaaga

SEQ ID NO: 2600 - DNA, 25 bp, Homo sapiens
tgaaggcctttatccagtttaagaa

SEQ ID NO: 2601 - DNA, 25 bp, Homo sapiens
gaaggcctttatccagtttaagaag

SEQ ID NO: 2602 - DNA, 25 bp, Homo sapiens
aaggcctttatccagtttaagaagc

SEQ ID NO: 2603 - DNA, 25 bp, Homo sapiens
aggcctttatccagtttaagaagcc

SEQ ID NO: 2604 - DNA, 25 bp, Homo sapiens
ggcctttatccagtttaagaagcct

SEQ ID NO: 2605 - DNA, 25 bp, Homo sapiens
gcctttatccagtttaagaagccta

SEQ ID NO: 2606 - DNA, 25 bp, Homo sapiens
cctttatccagtttaagaagcctat

SEQ ID NO: 2607 - DNA, 25 bp, Homo sapiens
ctttatccagtttaagaagcctatc

SEQ ID NO: 2608 - DNA, 25 bp, Homo sapiens
tttatccagtttaagaagcctatcg

SEQ ID NO: 2609 - DNA, 25 bp, Homo sapiens
ttatccagtttaagaagcctatcgt

SEQ ID NO: 2610 - DNA, 25 bp, Homo sapiens
tatccagtttaagaagcctatcgtg

SEQ ID NO: 2611 - DNA, 25 bp, Homo sapiens
atccagtttaagaagcctatcgtgg

SEQ ID NO: 2612 - DNA, 25 bp, Homo sapiens
tccagtttaagaagcctatcgtggt

SEQ ID NO: 2613 - DNA, 25 bp, Homo sapiens
ccagtttaagaagcctatcgtggtg

SEQ ID NO: 2614 - DNA, 25 bp, Homo sapiens
cagtttaagaagcctatcgtggtgg

SEQ ID NO: 2615 - DNA, 25 bp, Homo sapiens
agtttaagaagcctatcgtggtggc

SEQ ID NO: 2616 - DNA, 25 bp, Homo sapiens
gtttaagaagcctatcgtggtggcc

SEQ ID NO: 2617 - DNA, 25 bp, Homo sapiens
tttaagaagcctatcgtggtggcca

SEQ ID NO: 2618 - DNA, 25 bp, Homo sapiens
ttaagaagcctatcgtggtggccat

SEQ ID NO: 2619 - DNA, 25 bp, Homo sapiens
taagaagcctatcgtggtggccatc

SEQ ID NO: 2620 - DNA, 25 bp, Homo sapiens
aagaagcctatcgtggtggccatca

SEQ ID NO: 2621 - DNA, 25 bp, Homo sapiens
agaagcctatcgtggtggccatcaa

SEQ ID NO: 2622 - DNA, 25 bp, Homo sapiens
gaagcctatcgtggtggccatcaat

SEQ ID NO: 2623 - DNA, 25 bp, Homo sapiens
aagcctatcgtggtggccatcaatg

SEQ ID NO: 2624 - DNA, 25 bp, Homo sapiens
agcctatcgtggtggccatcaatgg

SEQ ID NO: 2625 - DNA, 25 bp, Homo sapiens
gcctatcgtggtggccatcaatggg

SEQ ID NO: 2626 - DNA, 25 bp, Homo sapiens
cctatcgtggtggccatcaatgggc

SEQ ID NO: 2627 - DNA, 25 bp, Homo sapiens
ctatcgtggtggccatcaatgggcc

SEQ ID NO: 2628 - DNA, 25 bp, Homo sapiens
tatcgtggtggccatcaatgggccg

SEQ ID NO: 2629 - DNA, 25 bp, Homo sapiens
atcgtggtggccatcaatgggccgg

SEQ ID NO: 2630 - DNA, 25 bp, Homo sapiens
tcgtggtggccatcaatgggccggc

SEQ ID NO: 2631 - DNA, 25 bp, Homo sapiens
cgtggtggccatcaatgggccggcc

SEQ ID NO: 2632 - DNA, 25 bp, Homo sapiens
gtggtggccatcaatgggccggccc

SEQ ID NO: 2633 - DNA, 25 bp, Homo sapiens
tggtggccatcaatgggccggccct

SEQ ID NO: 2634 - DNA, 25 bp, Homo sapiens
ggtggccatcaatgggccggccctg

SEQ ID NO: 2635 - DNA, 25 bp, Homo sapiens
gtggccatcaatgggccggccctgg

SEQ ID NO: 2636 - DNA, 25 bp, Homo sapiens
tggccatcaatgggccggccctggg

SEQ ID NO: 2637 - DNA, 25 bp, Homo sapiens
ggccatcaatgggccggccctgggc

SEQ ID NO: 2638 - DNA, 25 bp, Homo sapiens
gccatcaatgggccggccctgggcc

SEQ ID NO: 2639 - DNA, 25 bp, Homo sapiens
ccatcaatgggccggccctgggcct

SEQ ID NO: 2640 - DNA, 25 bp, Homo sapiens
catcaatgggccggccctgggcctg

SEQ ID NO: 2641 - DNA, 25 bp, Homo sapiens
atcaatgggccggccctgggcctgg

SEQ ID NO: 2642 - DNA, 25 bp, Homo sapiens
tcaatgggccggccctgggcctggg

SEQ ID NO: 2643 - DNA, 25 bp, Homo sapiens
caatgggccggccctgggcctgggt

SEQ ID NO: 2644 - DNA, 25 bp, Homo sapiens
aatgggccggccctgggcctgggtg

SEQ ID NO: 2645 - DNA, 25 bp, Homo sapiens
atgggccggccctgggcctgggtgc

SEQ ID NO: 2646 - DNA, 25 bp, Homo sapiens
tgggccggccctgggcctgggtgcc

SEQ ID NO: 2647 - DNA, 25 bp, Homo sapiens
gggccggccctgggcctgggtgcct

SEQ ID NO: 2648 - DNA, 25 bp, Homo sapiens
ggccggccctgggcctgggtgcctc

SEQ ID NO: 2649 - DNA, 25 bp, Homo sapiens
gccggccctgggcctgggtgcctcc

SEQ ID NO: 2650 - DNA, 25 bp, Homo sapiens
ccggccctgggcctgggtgcctcca

SEQ ID NO: 2651 - DNA, 25 bp, Homo sapiens
cggccctgggcctgggtgcctccat

SEQ ID NO: 2652 - DNA, 25 bp, Homo sapiens
ggccctgggcctgggtgcctccatc

SEQ ID NO: 2653 - DNA, 25 bp, Homo sapiens
gccctgggcctgggtgcctccatcc

SEQ ID NO: 2654 - DNA, 25 bp, Homo sapiens
ccctgggcctgggtgcctccatcct

SEQ ID NO: 2655 - DNA, 25 bp, Homo sapiens
cctgggcctgggtgcctccatcctg

SEQ ID NO: 2656 - DNA, 25 bp, Homo sapiens
ctgggcctgggtgcctccatcctgc

SEQ ID NO: 2657 - DNA, 25 bp, Homo sapiens
tgggcctgggtgcctccatcctgcc

SEQ ID NO: 2658 - DNA, 25 bp, Homo sapiens
gggcctgggtgcctccatcctgccc

SEQ ID NO: 2659 - DNA, 25 bp, Homo sapiens
ggcctgggtgcctccatcctgcccc

SEQ ID NO: 2660 - DNA, 25 bp, Homo sapiens
gcctgggtgcctccatcctgcccct

SEQ ID NO: 2661 - DNA, 25 bp, Homo sapiens
cctgggtgcctccatcctgcccctc

SEQ ID NO: 2662 - DNA, 25 bp, Homo sapiens
ctgggtgcctccatcctgcccctct

SEQ ID NO: 2663 - DNA, 25 bp, Homo sapiens
tgggtgcctccatcctgcccctctg

SEQ ID NO: 2664 - DNA, 25 bp, Homo sapiens
gggtgcctccatcctgcccctctgt

SEQ ID NO: 2665 - DNA, 25 bp, Homo sapiens
ggtgcctccatcctgcccctctgtg

SEQ ID NO: 2666 - DNA, 25 bp, Homo sapiens
gtgcctccatcctgcccctctgtga

SEQ ID NO: 2667 - DNA, 25 bp, Homo sapiens
tgcctccatcctgcccctctgtgac

SEQ ID NO: 2668 - DNA, 25 bp, Homo sapiens
gcctccatcctgcccctctgtgaca

SEQ ID NO: 2669 - DNA, 25 bp, Homo sapiens
cctccatcctgcccctctgtgacat

SEQ ID NO: 2670 - DNA, 25 bp, Homo sapiens
ctccatcctgcccctctgtgacatc

SEQ ID NO: 2671 - DNA, 25 bp, Homo sapiens
tccatcctgcccctctgtgacatcg

SEQ ID NO: 2672 - DNA, 25 bp, Homo sapiens
ccatcctgcccctctgtgacatcgt

SEQ ID NO: 2673 - DNA, 25 bp, Homo sapiens
catcctgcccctctgtgacatcgtg

SEQ ID NO: 2674 - DNA, 25 bp, Homo sapiens
atcctgcccctctgtgacatcgtgt

SEQ ID NO: 2675 - DNA, 25 bp, Homo sapiens
tcctgcccctctgtgacatcgtgtg

SEQ ID NO: 2676 - DNA, 25 bp, Homo sapiens
cctgcccctctgtgacatcgtgtgg

SEQ ID NO: 2677 - DNA, 25 bp, Homo sapiens
ctgcccctctgtgacatcgtgtggg

SEQ ID NO: 2678 - DNA, 25 bp, Homo sapiens
tgcccctctgtgacatcgtgtgggc

SEQ ID NO: 2679 - DNA, 25 bp, Homo sapiens
gcccctctgtgacatcgtgtgggcc

SEQ ID NO: 2680 - DNA, 25 bp, Homo sapiens
cccctctgtgacatcgtgtgggcca

SEQ ID NO: 2681 - DNA, 25 bp, Homo sapiens
ccctctgtgacatcgtgtgggccag

SEQ ID NO: 2682 - DNA, 25 bp, Homo sapiens
cctctgtgacatcgtgtgggccagt

SEQ ID NO: 2683 - DNA, 25 bp, Homo sapiens
ctctgtgacatcgtgtgggccagtg

SEQ ID NO: 2684 - DNA, 25 bp, Homo sapiens
tctgtgacatcgtgtgggccagtga

SEQ ID NO: 2685 - DNA, 25 bp, Homo sapiens
ctgtgacatcgtgtgggccagtgag

SEQ ID NO: 2686 - DNA, 25 bp, Homo sapiens
tgtgacatcgtgtgggccagtgaga

SEQ ID NO: 2687 - DNA, 25 bp, Homo sapiens
gtgacatcgtgtgggccagtgagaa

SEQ ID NO: 2688 - DNA, 25 bp, Homo sapiens
tgacatcgtgtgggccagtgagaag

SEQ ID NO: 2689 - DNA, 25 bp, Homo sapiens
gacatcgtgtgggccagtgagaagg

SEQ ID NO: 2690 - DNA, 25 bp, Homo sapiens
acatcgtgtgggccagtgagaaggc

SEQ ID NO: 2691 - DNA, 25 bp, Homo sapiens
catcgtgtgggccagtgagaaggcc

SEQ ID NO: 2692 - DNA, 25 bp, Homo sapiens
atcgtgtgggccagtgagaaggcct

SEQ ID NO: 2693 - DNA, 25 bp, Homo sapiens
tcgtgtgggccagtgagaaggcctg

SEQ ID NO: 2694 - DNA, 25 bp, Homo sapiens
cgtgtgggccagtgagaaggcctgg

SEQ ID NO: 2695 - DNA, 25 bp, Homo sapiens
gtgtgggccagtgagaaggcctggt

SEQ ID NO: 2696 - DNA, 25 bp, Homo sapiens
tgtgggccagtgagaaggcctggtt

SEQ ID NO: 2697 - DNA, 25 bp, Homo sapiens
gtgggccagtgagaaggcctggttc

SEQ ID NO: 2698 - DNA, 25 bp, Homo sapiens
tgggccagtgagaaggcctggttcc

SEQ ID NO: 2699 - DNA, 25 bp, Homo sapiens
gggccagtgagaaggcctggttcca

SEQ ID NO: 2700 - DNA, 25 bp, Homo sapiens
ggccagtgagaaggcctggttccag

SEQ ID NO: 2701 - DNA, 25 bp, Homo sapiens
gccagtgagaaggcctggttccaga

SEQ ID NO: 2702 - DNA, 25 bp, Homo sapiens
ccagtgagaaggcctggttccagac

SEQ ID NO: 2703 - DNA, 25 bp, Homo sapiens
cagtgagaaggcctggttccagacg

SEQ ID NO: 2704 - DNA, 25 bp, Homo sapiens
agtgagaaggcctggttccagacgc

SEQ ID NO: 2705 - DNA, 25 bp, Homo sapiens
gtgagaaggcctggttccagacgcc

SEQ ID NO: 2706 - DNA, 25 bp, Homo sapiens
tgagaaggcctggttccagacgccc

SEQ ID NO: 2707 - DNA, 25 bp, Homo sapiens
gagaaggcctggttccagacgccct

SEQ ID NO: 2708 - DNA, 25 bp, Homo sapiens
agaaggcctggttccagacgcccta

SEQ ID NO: 2709 - DNA, 25 bp, Homo sapiens
gaaggcctggttccagacgccctac

SEQ ID NO: 2710 - DNA, 25 bp, Homo sapiens
aaggcctggttccagacgccctacg

SEQ ID NO: 2711 - DNA, 25 bp, Homo sapiens
aggcctggttccagacgccctacgc

SEQ ID NO: 2712 - DNA, 25 bp, Homo sapiens
ggcctggttccagacgccctacgcc

SEQ ID NO: 2713 - DNA, 25 bp, Homo sapiens
gcctggttccagacgccctacgcca

SEQ ID NO: 2714 - DNA, 25 bp, Homo sapiens
cctggttccagacgccctacgccac

SEQ ID NO: 2715 - DNA, 25 bp, Homo sapiens
ctggttccagacgccctacgccacc

SEQ ID NO: 2716 - DNA, 25 bp, Homo sapiens
tggttccagacgccctacgccacca

SEQ ID NO: 2717 - DNA, 25 bp, Homo sapiens
ggttccagacgccctacgccaccat

SEQ ID NO: 2718 - DNA, 25 bp, Homo sapiens
gttccagacgccctacgccaccatc

SEQ ID NO: 2719 - DNA, 25 bp, Homo sapiens
ttccagacgccctacgccaccatcc

SEQ ID NO: 2720 - DNA, 25 bp, Homo sapiens
tccagacgccctacgccaccatccg

SEQ ID NO: 2721 - DNA, 25 bp, Homo sapiens
ccagacgccctacgccaccatccgc

SEQ ID NO: 2722 - DNA, 25 bp, Homo sapiens
cagacgccctacgccaccatccgcc

SEQ ID NO: 2723 - DNA, 25 bp, Homo sapiens
agacgccctacgccaccatccgcct

SEQ ID NO: 2724 - DNA, 25 bp, Homo sapiens
gacgccctacgccaccatccgcctc

SEQ ID NO: 2725 - DNA, 25 bp, Homo sapiens
acgccctacgccaccatccgcctca

SEQ ID NO: 2726 - DNA, 25 bp, Homo sapiens
cgccctacgccaccatccgcctcac

SEQ ID NO: 2727 - DNA, 25 bp, Homo sapiens
gccctacgccaccatccgcctcacg

SEQ ID NO: 2728 - DNA, 25 bp, Homo sapiens
ccctacgccaccatccgcctcacgc

SEQ ID NO: 2729 - DNA, 25 bp, Homo sapiens
cctacgccaccatccgcctcacgcc

SEQ ID NO: 2730 - DNA, 25 bp, Homo sapiens
ctacgccaccatccgcctcacgcct

SEQ ID NO: 2731 - DNA, 25 bp, Homo sapiens
tacgccaccatccgcctcacgcctg

SEQ ID NO: 2732 - DNA, 25 bp, Homo sapiens
acgccaccatccgcctcacgcctgc

SEQ ID NO: 2733 - DNA, 25 bp, Homo sapiens
cgccaccatccgcctcacgcctgct

SEQ ID NO: 2734 - DNA, 25 bp, Homo sapiens
gccaccatccgcctcacgcctgctg

SEQ ID NO: 2735 - DNA, 25 bp, Homo sapiens
ccaccatccgcctcacgcctgctgg

SEQ ID NO: 2736 - DNA, 25 bp, Homo sapiens
caccatccgcctcacgcctgctggc

SEQ ID NO: 2737 - DNA, 25 bp, Homo sapiens
accatccgcctcacgcctgctggct

SEQ ID NO: 2738 - DNA, 25 bp, Homo sapiens
ccatccgcctcacgcctgctggctg

SEQ ID NO: 2739 - DNA, 25 bp, Homo sapiens
catccgcctcacgcctgctggctgc

SEQ ID NO: 2740 - DNA, 25 bp, Homo sapiens
atccgcctcacgcctgctggctgct

SEQ ID NO: 2741 - DNA, 25 bp, Homo sapiens
tccgcctcacgcctgctggctgctc

SEQ ID NO: 2742 - DNA, 25 bp, Homo sapiens
ccgcctcacgcctgctggctgctcc

SEQ ID NO: 2743 - DNA, 25 bp, Homo sapiens
cgcctcacgcctgctggctgctcct

SEQ ID NO: 2744 - DNA, 25 bp, Homo sapiens
gcctcacgcctgctggctgctcctc

SEQ ID NO: 2745 - DNA, 25 bp, Homo sapiens
cctcacgcctgctggctgctcctcc

SEQ ID NO: 2746 - DNA, 25 bp, Homo sapiens
ctcacgcctgctggctgctcctcct

SEQ ID NO: 2747 - DNA, 25 bp, Homo sapiens
tcacgcctgctggctgctcctccta

SEQ ID NO: 2748 - DNA, 25 bp, Homo sapiens
cacgcctgctggctgctcctcctac

SEQ ID NO: 2749 - DNA, 25 bp, Homo sapiens
acgcctgctggctgctcctcctaca

SEQ ID NO: 2750 - DNA, 25 bp, Homo sapiens
cgcctgctggctgctcctcctacac

SEQ ID NO: 2751 - DNA, 25 bp, Homo sapiens
gcctgctggctgctcctcctacacc

SEQ ID NO: 2752 - DNA, 25 bp, Homo sapiens
cctgctggctgctcctcctacacct

SEQ ID NO: 2753 - DNA, 25 bp, Homo sapiens
ctgctggctgctcctcctacacctt

SEQ ID NO: 2754 - DNA, 25 bp, Homo sapiens
tgctggctgctcctcctacaccttc

SEQ ID NO: 2755 - DNA, 25 bp, Homo sapiens
gctggctgctcctcctacaccttcc

SEQ ID NO: 2756 - DNA, 25 bp, Homo sapiens
ctggctgctcctcctacaccttccc

SEQ ID NO: 2757 - DNA, 25 bp, Homo sapiens
tggctgctcctcctacaccttcccc

SEQ ID NO: 2758 - DNA, 25 bp, Homo sapiens
ggctgctcctcctacaccttccccc

SEQ ID NO: 2759 - DNA, 25 bp, Homo sapiens
gctgctcctcctacaccttccccca

SEQ ID NO: 2760 - DNA, 25 bp, Homo sapiens
ctgctcctcctacaccttcccccag

SEQ ID NO: 2761 - DNA, 25 bp, Homo sapiens
tgctcctcctacaccttcccccaga

SEQ ID NO: 2762 - DNA, 25 bp, Homo sapiens
gctcctcctacaccttcccccagat

SEQ ID NO: 2763 - DNA, 25 bp, Homo sapiens
ctcctcctacaccttcccccagatc

SEQ ID NO: 2764 - DNA, 25 bp, Homo sapiens
tcctcctacaccttcccccagatcc

SEQ ID NO: 2765 - DNA, 25 bp, Homo sapiens
cctcctacaccttcccccagatcct

SEQ ID NO: 2766 - DNA, 25 bp, Homo sapiens
ctcctacaccttcccccagatcctg

SEQ ID NO: 2767 - DNA, 25 bp, Homo sapiens
tcctacaccttcccccagatcctgg

SEQ ID NO: 2768 - DNA, 25 bp, Homo sapiens
cctacaccttcccccagatcctggg

SEQ ID NO: 2769 - DNA, 25 bp, Homo sapiens
ctacaccttcccccagatcctgggc

SEQ ID NO: 2770 - DNA, 25 bp, Homo sapiens
tacaccttcccccagatcctgggcg

SEQ ID NO: 2771 - DNA, 25 bp, Homo sapiens
acaccttcccccagatcctgggcgt

SEQ ID NO: 2772 - DNA, 25 bp, Homo sapiens
caccttcccccagatcctgggcgtc

SEQ ID NO: 2773 - DNA, 25 bp, Homo sapiens
accttcccccagatcctgggcgtcg

SEQ ID NO: 2774 - DNA, 25 bp, Homo sapiens
ccttcccccagatcctgggcgtcgc

SEQ ID NO: 2775 - DNA, 25 bp, Homo sapiens
cttcccccagatcctgggcgtcgcg

SEQ ID NO: 2776 - DNA, 25 bp, Homo sapiens
ttcccccagatcctgggcgtcgcgc

SEQ ID NO: 2777 - DNA, 25 bp, Homo sapiens
tcccccagatcctgggcgtcgcgct

SEQ ID NO: 2778 - DNA, 25 bp, Homo sapiens
cccccagatcctgggcgtcgcgctg

SEQ ID NO: 2779 - DNA, 25 bp, Homo sapiens
ccccagatcctgggcgtcgcgctgg

SEQ ID NO: 2780 - DNA, 25 bp, Homo sapiens
cccagatcctgggcgtcgcgctggc

SEQ ID NO: 2781 - DNA, 25 bp, Homo sapiens
ccagatcctgggcgtcgcgctggcc

SEQ ID NO: 2782 - DNA, 25 bp, Homo sapiens
cagatcctgggcgtcgcgctggcca

SEQ ID NO: 2783 - DNA, 25 bp, Homo sapiens
agatcctgggcgtcgcgctggccaa

SEQ ID NO: 2784 - DNA, 25 bp, Homo sapiens
gatcctgggcgtcgcgctggccaat

SEQ ID NO: 2785 - DNA, 25 bp, Homo sapiens
atcctgggcgtcgcgctggccaatg

SEQ ID NO: 2786 - DNA, 25 bp, Homo sapiens
tcctgggcgtcgcgctggccaatga

SEQ ID NO: 2787 - DNA, 25 bp, Homo sapiens
cctgggcgtcgcgctggccaatgag

SEQ ID NO: 2788 - DNA, 25 bp, Homo sapiens
ctgggcgtcgcgctggccaatgaga

SEQ ID NO: 2789 - DNA, 25 bp, Homo sapiens
tgggcgtcgcgctggccaatgagat

SEQ ID NO: 2790 - DNA, 25 bp, Homo sapiens
gggcgtcgcgctggccaatgagatg

SEQ ID NO: 2791 - DNA, 25 bp, Homo sapiens
ggcgtcgcgctggccaatgagatgc

SEQ ID NO: 2792 - DNA, 25 bp, Homo sapiens
gcgtcgcgctggccaatgagatgct

SEQ ID NO: 2793 - DNA, 25 bp, Homo sapiens
cgtcgcgctggccaatgagatgctg

SEQ ID NO: 2794 - DNA, 25 bp, Homo sapiens
gtcgcgctggccaatgagatgctgt

SEQ ID NO: 2795 - DNA, 25 bp, Homo sapiens
tcgcgctggccaatgagatgctgtt

SEQ ID NO: 2796 - DNA, 25 bp, Homo sapiens
cgcgctggccaatgagatgctgttc

SEQ ID NO: 2797 - DNA, 25 bp, Homo sapiens
gcgctggccaatgagatgctgttct

SEQ ID NO: 2798 - DNA, 25 bp, Homo sapiens
cgctggccaatgagatgctgttctg

SEQ ID NO: 2799 - DNA, 25 bp, Homo sapiens
gctggccaatgagatgctgttctgt

SEQ ID NO: 2800 - DNA, 25 bp, Homo sapiens
ctggccaatgagatgctgttctgtg

SEQ ID NO: 2801 - DNA, 25 bp, Homo sapiens
tggccaatgagatgctgttctgtgg

SEQ ID NO: 2802 - DNA, 25 bp, Homo sapiens
ggccaatgagatgctgttctgtggg

SEQ ID NO: 2803 - DNA, 25 bp, Homo sapiens
gccaatgagatgctgttctgtgggc

SEQ ID NO: 2804 - DNA, 25 bp, Homo sapiens
ccaatgagatgctgttctgtgggcg

SEQ ID NO: 2805 - DNA, 25 bp, Homo sapiens
caatgagatgctgttctgtgggcgg

SEQ ID NO: 2806 - DNA, 25 bp, Homo sapiens
aatgagatgctgttctgtgggcgga

SEQ ID NO: 2807 - DNA, 25 bp, Homo sapiens
atgagatgctgttctgtgggcggaa

SEQ ID NO: 2808 - DNA, 25 bp, Homo sapiens
tgagatgctgttctgtgggcggaag

SEQ ID NO: 2809 - DNA, 25 bp, Homo sapiens
gagatgctgttctgtgggcggaagc

SEQ ID NO: 2810 - DNA, 25 bp, Homo sapiens
agatgctgttctgtgggcggaagct

SEQ ID NO: 2811 - DNA, 25 bp, Homo sapiens
gatgctgttctgtgggcggaagctc

SEQ ID NO: 2812 - DNA, 25 bp, Homo sapiens
atgctgttctgtgggcggaagctca

SEQ ID NO: 2813 - DNA, 25 bp, Homo sapiens
tgctgttctgtgggcggaagctcac

SEQ ID NO: 2814 - DNA, 25 bp, Homo sapiens
gctgttctgtgggcggaagctcacc

SEQ ID NO: 2815 - DNA, 25 bp, Homo sapiens
ctgttctgtgggcggaagctcaccg

SEQ ID NO: 2816 - DNA, 25 bp, Homo sapiens
tgttctgtgggcggaagctcaccgc

SEQ ID NO: 2817 - DNA, 25 bp, Homo sapiens
gttctgtgggcggaagctcaccgcc

SEQ ID NO: 2818 - DNA, 25 bp, Homo sapiens
ttctgtgggcggaagctcaccgccc

SEQ ID NO: 2819 - DNA, 25 bp, Homo sapiens
tctgtgggcggaagctcaccgccca

SEQ ID NO: 2820 - DNA, 25 bp, Homo sapiens
ctgtgggcggaagctcaccgcccag

SEQ ID NO: 2821 - DNA, 25 bp, Homo sapiens
tgtgggcggaagctcaccgcccagg

SEQ ID NO: 2822 - DNA, 25 bp, Homo sapiens
gtgggcggaagctcaccgcccagga

SEQ ID NO: 2823 - DNA, 25 bp, Homo sapiens
tgggcggaagctcaccgcccaggag

SEQ ID NO: 2824 - DNA, 25 bp, Homo sapiens
gggcggaagctcaccgcccaggagg

SEQ ID NO: 2825 - DNA, 25 bp, Homo sapiens
ggcggaagctcaccgcccaggaggc

SEQ ID NO: 2826 - DNA, 25 bp, Homo sapiens
gcggaagctcaccgcccaggaggcc

SEQ ID NO: 2827 - DNA, 25 bp, Homo sapiens
cggaagctcaccgcccaggaggcct

SEQ ID NO: 2828 - DNA, 25 bp, Homo sapiens
ggaagctcaccgcccaggaggcctg

SEQ ID NO: 2829 - DNA, 25 bp, Homo sapiens
gaagctcaccgcccaggaggcctgc

SEQ ID NO: 2830 - DNA, 25 bp, Homo sapiens
aagctcaccgcccaggaggcctgca

SEQ ID NO: 2831 - DNA, 25 bp, Homo sapiens
agctcaccgcccaggaggcctgcag

SEQ ID NO: 2832 - DNA, 25 bp, Homo sapiens
gctcaccgcccaggaggcctgcagc

SEQ ID NO: 2833 - DNA, 25 bp, Homo sapiens
ctcaccgcccaggaggcctgcagca

SEQ ID NO: 2834 - DNA, 25 bp, Homo sapiens
tcaccgcccaggaggcctgcagcag

SEQ ID NO: 2835 - DNA, 25 bp, Homo sapiens
caccgcccaggaggcctgcagcagg

SEQ ID NO: 2836 - DNA, 25 bp, Homo sapiens
accgcccaggaggcctgcagcaggg

SEQ ID NO: 2837 - DNA, 25 bp, Homo sapiens
ccgcccaggaggcctgcagcagggg

SEQ ID NO: 2838 - DNA, 25 bp, Homo sapiens
cgcccaggaggcctgcagcaggggg

SEQ ID NO: 2839 - DNA, 25 bp, Homo sapiens
gcccaggaggcctgcagcagggggc

SEQ ID NO: 2840 - DNA, 25 bp, Homo sapiens
cccaggaggcctgcagcagggggct

SEQ ID NO: 2841 - DNA, 25 bp, Homo sapiens
ccaggaggcctgcagcagggggctg

SEQ ID NO: 2842 - DNA, 25 bp, Homo sapiens
caggaggcctgcagcagggggctgg

SEQ ID NO: 2843 - DNA, 25 bp, Homo sapiens
aggaggcctgcagcagggggctggt

SEQ ID NO: 2844 - DNA, 25 bp, Homo sapiens
ggaggcctgcagcagggggctggtg

SEQ ID NO: 2845 - DNA, 25 bp, Homo sapiens
gaggcctgcagcagggggctggtgt

SEQ ID NO: 2846 - DNA, 25 bp, Homo sapiens
aggcctgcagcagggggctggtgtc

SEQ ID NO: 2847 - DNA, 25 bp, Homo sapiens
ggcctgcagcagggggctggtgtcg

SEQ ID NO: 2848 - DNA, 25 bp, Homo sapiens
gcctgcagcagggggctggtgtcgc

SEQ ID NO: 2849 - DNA, 25 bp, Homo sapiens
cctgcagcagggggctggtgtcgca

SEQ ID NO: 2850 - DNA, 25 bp, Homo sapiens
ctgcagcagggggctggtgtcgcag

SEQ ID NO: 2851 - DNA, 25 bp, Homo sapiens
tgcagcagggggctggtgtcgcagg

SEQ ID NO: 2852 - DNA, 25 bp, Homo sapiens
gcagcagggggctggtgtcgcaggt

SEQ ID NO: 2853 - DNA, 25 bp, Homo sapiens
cagcagggggctggtgtcgcaggtc

SEQ ID NO: 2854 - DNA, 25 bp, Homo sapiens
agcagggggctggtgtcgcaggtct

SEQ ID NO: 2855 - DNA, 25 bp, Homo sapiens
gcagggggctggtgtcgcaggtctt

SEQ ID NO: 2856 - DNA, 25 bp, Homo sapiens
cagggggctggtgtcgcaggtcttc

SEQ ID NO: 2857 - DNA, 25 bp, Homo sapiens
agggggctggtgtcgcaggtcttct

SEQ ID NO: 2858 - DNA, 25 bp, Homo sapiens
gggggctggtgtcgcaggtcttctg

SEQ ID NO: 2859 - DNA, 25 bp, Homo sapiens
ggggctggtgtcgcaggtcttctgg

SEQ ID NO: 2860 - DNA, 25 bp, Homo sapiens
gggctggtgtcgcaggtcttctggc

SEQ ID NO: 2861 - DNA, 25 bp, Homo sapiens
ggctggtgtcgcaggtcttctggcc

SEQ ID NO: 2862 - DNA, 25 bp, Homo sapiens
gctggtgtcgcaggtcttctggccc

SEQ ID NO: 2863 - DNA, 25 bp, Homo sapiens
ctggtgtcgcaggtcttctggccca

SEQ ID NO: 2864 - DNA, 25 bp, Homo sapiens
tggtgtcgcaggtcttctggcccac

SEQ ID NO: 2865 - DNA, 25 bp, Homo sapiens
ggtgtcgcaggtcttctggcccacc

SEQ ID NO: 2866 - DNA, 25 bp, Homo sapiens
gtgtcgcaggtcttctggcccacca

SEQ ID NO: 2867 - DNA, 25 bp, Homo sapiens
tgtcgcaggtcttctggcccaccac

SEQ ID NO: 2868 - DNA, 25 bp, Homo sapiens
gtcgcaggtcttctggcccaccacg

SEQ ID NO: 2869 - DNA, 25 bp, Homo sapiens
tcgcaggtcttctggcccaccacgt

SEQ ID NO: 2870 - DNA, 25 bp, Homo sapiens
cgcaggtcttctggcccaccacgtt

SEQ ID NO: 2871 - DNA, 25 bp, Homo sapiens
gcaggtcttctggcccaccacgttc

SEQ ID NO: 2872 - DNA, 25 bp, Homo sapiens
caggtcttctggcccaccacgttca

SEQ ID NO: 2873 - DNA, 25 bp, Homo sapiens
aggtcttctggcccaccacgttcag

SEQ ID NO: 2874 - DNA, 25 bp, Homo sapiens
ggtcttctggcccaccacgttcagc

SEQ ID NO: 2875 - DNA, 25 bp, Homo sapiens
gtcttctggcccaccacgttcagcc

SEQ ID NO: 2876 - DNA, 25 bp, Homo sapiens
tcttctggcccaccacgttcagcca

SEQ ID NO: 2877 - DNA, 25 bp, Homo sapiens
cttctggcccaccacgttcagccag

SEQ ID NO: 2878 - DNA, 25 bp, Homo sapiens
ttctggcccaccacgttcagccagg

SEQ ID NO: 2879 - DNA, 25 bp, Homo sapiens
tctggcccaccacgttcagccagga

SEQ ID NO: 2880 - DNA, 25 bp, Homo sapiens
ctggcccaccacgttcagccaggag

SEQ ID NO: 2881 - DNA, 25 bp, Homo sapiens
tggcccaccacgttcagccaggagg

SEQ ID NO: 2882 - DNA, 25 bp, Homo sapiens
ggcccaccacgttcagccaggaggt

SEQ ID NO: 2883 - DNA, 25 bp, Homo sapiens
gcccaccacgttcagccaggaggtc

SEQ ID NO: 2884 - DNA, 25 bp, Homo sapiens
cccaccacgttcagccaggaggtca

SEQ ID NO: 2885 - DNA, 25 bp, Homo sapiens
ccaccacgttcagccaggaggtcat

SEQ ID NO: 2886 - DNA, 25 bp, Homo sapiens
caccacgttcagccaggaggtcatg

SEQ ID NO: 2887 - DNA, 25 bp, Homo sapiens
accacgttcagccaggaggtcatgc

SEQ ID NO: 2888 - DNA, 25 bp, Homo sapiens
ccacgttcagccaggaggtcatgct

SEQ ID NO: 2889 - DNA, 25 bp, Homo sapiens
cacgttcagccaggaggtcatgctg

SEQ ID NO: 2890 - DNA, 25 bp, Homo sapiens
acgttcagccaggaggtcatgctgc

SEQ ID NO: 2891 - DNA, 25 bp, Homo sapiens
cgttcagccaggaggtcatgctgcg

SEQ ID NO: 2892 - DNA, 25 bp, Homo sapiens
gttcagccaggaggtcatgctgcgg

SEQ ID NO: 2893 - DNA, 25 bp, Homo sapiens
ttcagccaggaggtcatgctgcggg

SEQ ID NO: 2894 - DNA, 25 bp, Homo sapiens
tcagccaggaggtcatgctgcgggt

SEQ ID NO: 2895 - DNA, 25 bp, Homo sapiens
cagccaggaggtcatgctgcgggtc

SEQ ID NO: 2896 - DNA, 25 bp, Homo sapiens
agccaggaggtcatgctgcgggtca

SEQ ID NO: 2897 - DNA, 25 bp, Homo sapiens
gccaggaggtcatgctgcgggtcaa

SEQ ID NO: 2898 - DNA, 25 bp, Homo sapiens
ccaggaggtcatgctgcgggtcaag

SEQ ID NO: 2899 - DNA, 25 bp, Homo sapiens
caggaggtcatgctgcgggtcaagg

SEQ ID NO: 2900 - DNA, 25 bp, Homo sapiens
aggaggtcatgctgcgggtcaagga

SEQ ID NO: 2901 - DNA, 25 bp, Homo sapiens
ggaggtcatgctgcgggtcaaggag

SEQ ID NO: 2902 - DNA, 25 bp, Homo sapiens
gaggtcatgctgcgggtcaaggaga

SEQ ID NO: 2903 - DNA, 25 bp, Homo sapiens
aggtcatgctgcgggtcaaggagat

SEQ ID NO: 2904 - DNA, 25 bp, Homo sapiens
ggtcatgctgcgggtcaaggagatg

SEQ ID NO: 2905 - DNA, 25 bp, Homo sapiens
gtcatgctgcgggtcaaggagatgg

SEQ ID NO: 2906 - DNA, 25 bp, Homo sapiens
tcatgctgcgggtcaaggagatggc

SEQ ID NO: 2907 - DNA, 25 bp, Homo sapiens
catgctgcgggtcaaggagatggca

SEQ ID NO: 2908 - DNA, 25 bp, Homo sapiens
atgctgcgggtcaaggagatggcat

SEQ ID NO: 2909 - DNA, 25 bp, Homo sapiens
tgctgcgggtcaaggagatggcatc

SEQ ID NO: 2910 - DNA, 25 bp, Homo sapiens
gctgcgggtcaaggagatggcatcc

SEQ ID NO: 2911 - DNA, 25 bp, Homo sapiens
ctgcgggtcaaggagatggcatcct

SEQ ID NO: 2912 - DNA, 25 bp, Homo sapiens
tgcgggtcaaggagatggcatcctg

SEQ ID NO: 2913 - DNA, 25 bp, Homo sapiens
gcgggtcaaggagatggcatcctgc

SEQ ID NO: 2914 - DNA, 25 bp, Homo sapiens
cgggtcaaggagatggcatcctgca

SEQ ID NO: 2915 - DNA, 25 bp, Homo sapiens
gggtcaaggagatggcatcctgcag

SEQ ID NO: 2916 - DNA, 25 bp, Homo sapiens
ggtcaaggagatggcatcctgcagt

SEQ ID NO: 2917 - DNA, 25 bp, Homo sapiens
gtcaaggagatggcatcctgcagtg

SEQ ID NO: 2918 - DNA, 25 bp, Homo sapiens
tcaaggagatggcatcctgcagtgc

SEQ ID NO: 2919 - DNA, 25 bp, Homo sapiens
caaggagatggcatcctgcagtgcc

SEQ ID NO: 2920 - DNA, 25 bp, Homo sapiens
aaggagatggcatcctgcagtgccg

SEQ ID NO: 2921 - DNA, 25 bp, Homo sapiens
aggagatggcatcctgcagtgccgt

SEQ ID NO: 2922 - DNA, 25 bp, Homo sapiens
ggagatggcatcctgcagtgccgtg

SEQ ID NO: 2923 - DNA, 25 bp, Homo sapiens
gagatggcatcctgcagtgccgtgg

SEQ ID NO: 2924 - DNA, 25 bp, Homo sapiens
agatggcatcctgcagtgccgtggt

SEQ ID NO: 2925 - DNA, 25 bp, Homo sapiens
gatggcatcctgcagtgccgtggtg

SEQ ID NO: 2926 - DNA, 25 bp, Homo sapiens
atggcatcctgcagtgccgtggtgt

SEQ ID NO: 2927 - DNA, 25 bp, Homo sapiens
tggcatcctgcagtgccgtggtgtt

SEQ ID NO: 2928 - DNA, 25 bp, Homo sapiens
ggcatcctgcagtgccgtggtgtta

SEQ ID NO: 2929 - DNA, 25 bp, Homo sapiens
gcatcctgcagtgccgtggtgttag

SEQ ID NO: 2930 - DNA, 25 bp, Homo sapiens
catcctgcagtgccgtggtgttaga

SEQ ID NO: 2931 - DNA, 25 bp, Homo sapiens
atcctgcagtgccgtggtgttagag

SEQ ID NO: 2932 - DNA, 25 bp, Homo sapiens
tcctgcagtgccgtggtgttagagg

SEQ ID NO: 2933 - DNA, 25 bp, Homo sapiens
cctgcagtgccgtggtgttagagga

SEQ ID NO: 2934 - DNA, 25 bp, Homo sapiens
ctgcagtgccgtggtgttagaggag

SEQ ID NO: 2935 - DNA, 25 bp, Homo sapiens
tgcagtgccgtggtgttagaggagt

SEQ ID NO: 2936 - DNA, 25 bp, Homo sapiens
gcagtgccgtggtgttagaggagtc

SEQ ID NO: 2937 - DNA, 25 bp, Homo sapiens
cagtgccgtggtgttagaggagtcc

SEQ ID NO: 2938 - DNA, 25 bp, Homo sapiens
agtgccgtggtgttagaggagtcca

SEQ ID NO: 2939 - DNA, 25 bp, Homo sapiens
gtgccgtggtgttagaggagtccaa

SEQ ID NO: 2940 - DNA, 25 bp, Homo sapiens
tgccgtggtgttagaggagtccaaa

SEQ ID NO: 2941 - DNA, 25 bp, Homo sapiens
gccgtggtgttagaggagtccaaat

SEQ ID NO: 2942 - DNA, 25 bp, Homo sapiens
ccgtggtgttagaggagtccaaatg

SEQ ID NO: 2943 - DNA, 25 bp, Homo sapiens
cgtggtgttagaggagtccaaatgc

SEQ ID NO: 2944 - DNA, 25 bp, Homo sapiens
gtggtgttagaggagtccaaatgcc

SEQ ID NO: 2945 - DNA, 25 bp, Homo sapiens
tggtgttagaggagtccaaatgcct

SEQ ID NO: 2946 - DNA, 25 bp, Homo sapiens
ggtgttagaggagtccaaatgcctc

SEQ ID NO: 2947 - DNA, 25 bp, Homo sapiens
gtgttagaggagtccaaatgcctcg

SEQ ID NO: 2948 - DNA, 25 bp, Homo sapiens
tgttagaggagtccaaatgcctcgt

SEQ ID NO: 2949 - DNA, 25 bp, Homo sapiens
gttagaggagtccaaatgcctcgtg

SEQ ID NO: 2950 - DNA, 25 bp, Homo sapiens
ttagaggagtccaaatgcctcgtgc

SEQ ID NO: 2951 - DNA, 25 bp, Homo sapiens
tagaggagtccaaatgcctcgtgcg

SEQ ID NO: 2952 - DNA, 25 bp, Homo sapiens
agaggagtccaaatgcctcgtgcgg

SEQ ID NO: 2953 - DNA, 25 bp, Homo sapiens
gaggagtccaaatgcctcgtgcgga

SEQ ID NO: 2954 - DNA, 25 bp, Homo sapiens
aggagtccaaatgcctcgtgcggag

SEQ ID NO: 2955 - DNA, 25 bp, Homo sapiens
ggagtccaaatgcctcgtgcggagc

SEQ ID NO: 2956 - DNA, 25 bp, Homo sapiens
gagtccaaatgcctcgtgcggagct

SEQ ID NO: 2957 - DNA, 25 bp, Homo sapiens
agtccaaatgcctcgtgcggagctt

SEQ ID NO: 2958 - DNA, 25 bp, Homo sapiens
gtccaaatgcctcgtgcggagcttc

SEQ ID NO: 2959 - DNA, 25 bp, Homo sapiens
tccaaatgcctcgtgcggagcttcc

SEQ ID NO: 2960 - DNA, 25 bp, Homo sapiens
ccaaatgcctcgtgcggagcttcct

SEQ ID NO: 2961 - DNA, 25 bp, Homo sapiens
caaatgcctcgtgcggagcttcctg

SEQ ID NO: 2962 - DNA, 25 bp, Homo sapiens
aaatgcctcgtgcggagcttcctga

SEQ ID NO: 2963 - DNA, 25 bp, Homo sapiens
aatgcctcgtgcggagcttcctgaa

SEQ ID NO: 2964 - DNA, 25 bp, Homo sapiens
atgcctcgtgcggagcttcctgaaa

SEQ ID NO: 2965 - DNA, 25 bp, Homo sapiens
tgcctcgtgcggagcttcctgaaat

SEQ ID NO: 2966 - DNA, 25 bp, Homo sapiens
gcctcgtgcggagcttcctgaaatc

SEQ ID NO: 2967 - DNA, 25 bp, Homo sapiens
cctcgtgcggagcttcctgaaatca

SEQ ID NO: 2968 - DNA, 25 bp, Homo sapiens
ctcgtgcggagcttcctgaaatcag

SEQ ID NO: 2969 - DNA, 25 bp, Homo sapiens
tcgtgcggagcttcctgaaatcagt

SEQ ID NO: 2970 - DNA, 25 bp, Homo sapiens
cgtgcggagcttcctgaaatcagtg

SEQ ID NO: 2971 - DNA, 25 bp, Homo sapiens
gtgcggagcttcctgaaatcagtgc

SEQ ID NO: 2972 - DNA, 25 bp, Homo sapiens
tgcggagcttcctgaaatcagtgct

SEQ ID NO: 2973 - DNA, 25 bp, Homo sapiens
gcggagcttcctgaaatcagtgctg

SEQ ID NO: 2974 - DNA, 25 bp, Homo sapiens
cggagcttcctgaaatcagtgctgg

SEQ ID NO: 2975 - DNA, 25 bp, Homo sapiens
ggagcttcctgaaatcagtgctgga

SEQ ID NO: 2976 - DNA, 25 bp, Homo sapiens
gagcttcctgaaatcagtgctggaa

SEQ ID NO: 2977 - DNA, 25 bp, Homo sapiens
agcttcctgaaatcagtgctggaag

SEQ ID NO: 2978 - DNA, 25 bp, Homo sapiens
gcttcctgaaatcagtgctggaaga

SEQ ID NO: 2979 - DNA, 25 bp, Homo sapiens
cttcctgaaatcagtgctggaagac

SEQ ID NO: 2980 - DNA, 25 bp, Homo sapiens
ttcctgaaatcagtgctggaagacg

SEQ ID NO: 2981 - DNA, 25 bp, Homo sapiens
tcctgaaatcagtgctggaagacgt

SEQ ID NO: 2982 - DNA, 25 bp, Homo sapiens
cctgaaatcagtgctggaagacgtg

SEQ ID NO: 2983 - DNA, 25 bp, Homo sapiens
ctgaaatcagtgctggaagacgtga

SEQ ID NO: 2984 - DNA, 25 bp, Homo sapiens
tgaaatcagtgctggaagacgtgaa

SEQ ID NO: 2985 - DNA, 25 bp, Homo sapiens
gaaatcagtgctggaagacgtgaac

SEQ ID NO: 2986 - DNA, 25 bp, Homo sapiens
aaatcagtgctggaagacgtgaacg

SEQ ID NO: 2987 - DNA, 25 bp, Homo sapiens
aatcagtgctggaagacgtgaacga

SEQ ID NO: 2988 - DNA, 25 bp, Homo sapiens
atcagtgctggaagacgtgaacgag

SEQ ID NO: 2989 - DNA, 25 bp, Homo sapiens
tcagtgctggaagacgtgaacgaga

SEQ ID NO: 2990 - DNA, 25 bp, Homo sapiens
cagtgctggaagacgtgaacgagaa

SEQ ID NO: 2991 - DNA, 25 bp, Homo sapiens
agtgctggaagacgtgaacgagaag

SEQ ID NO: 2992 - DNA, 25 bp, Homo sapiens
gtgctggaagacgtgaacgagaagg

SEQ ID NO: 2993 - DNA, 25 bp, Homo sapiens
tgctggaagacgtgaacgagaagga

SEQ ID NO: 2994 - DNA, 25 bp, Homo sapiens
gctggaagacgtgaacgagaaggaa

SEQ ID NO: 2995 - DNA, 25 bp, Homo sapiens
ctggaagacgtgaacgagaaggaat

SEQ ID NO: 2996 - DNA, 25 bp, Homo sapiens
tggaagacgtgaacgagaaggaatg

SEQ ID NO: 2997 - DNA, 25 bp, Homo sapiens
ggaagacgtgaacgagaaggaatgc

SEQ ID NO: 2998 - DNA, 25 bp, Homo sapiens
gaagacgtgaacgagaaggaatgcc

SEQ ID NO: 2999 - DNA, 25 bp, Homo sapiens
aagacgtgaacgagaaggaatgcct

SEQ ID NO: 3000 - DNA, 25 bp, Homo sapiens
agacgtgaacgagaaggaatgcctc

SEQ ID NO: 3001 - DNA, 25 bp, Homo sapiens
gacgtgaacgagaaggaatgcctca

SEQ ID NO: 3002 - DNA, 25 bp, Homo sapiens
acgtgaacgagaaggaatgcctcat

SEQ ID NO: 3003 - DNA, 25 bp, Homo sapiens
cgtgaacgagaaggaatgcctcatg

SEQ ID NO: 3004 - DNA, 25 bp, Homo sapiens
gtgaacgagaaggaatgcctcatgc

SEQ ID NO: 3005 - DNA, 25 bp, Homo sapiens
tgaacgagaaggaatgcctcatgct

SEQ ID NO: 3006 - DNA, 25 bp, Homo sapiens
gaacgagaaggaatgcctcatgctc

SEQ ID NO: 3007 - DNA, 25 bp, Homo sapiens
aacgagaaggaatgcctcatgctca

SEQ ID NO: 3008 - DNA, 25 bp, Homo sapiens
acgagaaggaatgcctcatgctcaa

SEQ ID NO: 3009 - DNA, 25 bp, Homo sapiens
cgagaaggaatgcctcatgctcaag

SEQ ID NO: 3010 - DNA, 25 bp, Homo sapiens
gagaaggaatgcctcatgctcaagc

SEQ ID NO: 3011 - DNA, 25 bp, Homo sapiens
agaaggaatgcctcatgctcaagca

SEQ ID NO: 3012 - DNA, 25 bp, Homo sapiens
gaaggaatgcctcatgctcaagcag

SEQ ID NO: 3013 - DNA, 25 bp, Homo sapiens
aaggaatgcctcatgctcaagcagc

SEQ ID NO: 3014 - DNA, 25 bp, Homo sapiens
aggaatgcctcatgctcaagcagct

SEQ ID NO: 3015 - DNA, 25 bp, Homo sapiens
ggaatgcctcatgctcaagcagctc

SEQ ID NO: 3016 - DNA, 25 bp, Homo sapiens
gaatgcctcatgctcaagcagctct

SEQ ID NO: 3017 - DNA, 25 bp, Homo sapiens
aatgcctcatgctcaagcagctctg

SEQ ID NO: 3018 - DNA, 25 bp, Homo sapiens
atgcctcatgctcaagcagctctgg

SEQ ID NO: 3019 - DNA, 25 bp, Homo sapiens
tgcctcatgctcaagcagctctgga

SEQ ID NO: 3020 - DNA, 25 bp, Homo sapiens
gcctcatgctcaagcagctctggag

SEQ ID NO: 3021 - DNA, 25 bp, Homo sapiens
cctcatgctcaagcagctctggagc

SEQ ID NO: 3022 - DNA, 25 bp, Homo sapiens
ctcatgctcaagcagctctggagct

SEQ ID NO: 3023 - DNA, 25 bp, Homo sapiens
tcatgctcaagcagctctggagctc

SEQ ID NO: 3024 - DNA, 25 bp, Homo sapiens
catgctcaagcagctctggagctcc

SEQ ID NO: 3025 - DNA, 25 bp, Homo sapiens
atgctcaagcagctctggagctcct

SEQ ID NO: 3026 - DNA, 25 bp, Homo sapiens
tgctcaagcagctctggagctcctc

SEQ ID NO: 3027 - DNA, 25 bp, Homo sapiens
gctcaagcagctctggagctcctcc

SEQ ID NO: 3028 - DNA, 25 bp, Homo sapiens
ctcaagcagctctggagctcctcca

SEQ ID NO: 3029 - DNA, 25 bp, Homo sapiens
tcaagcagctctggagctcctccaa

SEQ ID NO: 3030 - DNA, 25 bp, Homo sapiens
caagcagctctggagctcctccaaa

SEQ ID NO: 3031 - DNA, 25 bp, Homo sapiens
aagcagctctggagctcctccaaag

SEQ ID NO: 3032 - DNA, 25 bp, Homo sapiens
agcagctctggagctcctccaaagg

SEQ ID NO: 3033 - DNA, 25 bp, Homo sapiens
gcagctctggagctcctccaaaggc

SEQ ID NO: 3034 - DNA, 25 bp, Homo sapiens
cagctctggagctcctccaaaggcc

SEQ ID NO: 3035 - DNA, 25 bp, Homo sapiens
agctctggagctcctccaaaggcct

SEQ ID NO: 3036 - DNA, 25 bp, Homo sapiens
gctctggagctcctccaaaggcctt

SEQ ID NO: 3037 - DNA, 25 bp, Homo sapiens
ctctggagctcctccaaaggccttg

SEQ ID NO: 3038 - DNA, 25 bp, Homo sapiens
tctggagctcctccaaaggccttga

SEQ ID NO: 3039 - DNA, 25 bp, Homo sapiens
ctggagctcctccaaaggccttgac

SEQ ID NO: 3040 - DNA, 25 bp, Homo sapiens
tggagctcctccaaaggccttgact

SEQ ID NO: 3041 - DNA, 25 bp, Homo sapiens
ggagctcctccaaaggccttgactc

SEQ ID NO: 3042 - DNA, 25 bp, Homo sapiens
gagctcctccaaaggccttgactcc

SEQ ID NO: 3043 - DNA, 25 bp, Homo sapiens
agctcctccaaaggccttgactccc

SEQ ID NO: 3044 - DNA, 25 bp, Homo sapiens
gctcctccaaaggccttgactccct

SEQ ID NO: 3045 - DNA, 25 bp, Homo sapiens
ctcctccaaaggccttgactccctt

SEQ ID NO: 3046 - DNA, 25 bp, Homo sapiens
tcctccaaaggccttgactcccttt

SEQ ID NO: 3047 - DNA, 25 bp, Homo sapiens
cctccaaaggccttgactccctttt

SEQ ID NO: 3048 - DNA, 25 bp, Homo sapiens
ctccaaaggccttgactcccttttc

SEQ ID NO: 3049 - DNA, 25 bp, Homo sapiens
tccaaaggccttgactcccttttca

SEQ ID NO: 3050 - DNA, 25 bp, Homo sapiens
ccaaaggccttgactcccttttcag

SEQ ID NO: 3051 - DNA, 25 bp, Homo sapiens
caaaggccttgactcccttttcagc

SEQ ID NO: 3052 - DNA, 25 bp, Homo sapiens
aaaggccttgactcccttttcagct

SEQ ID NO: 3053 - DNA, 25 bp, Homo sapiens
aaggccttgactcccttttcagcta

SEQ ID NO: 3054 - DNA, 25 bp, Homo sapiens
aggccttgactcccttttcagctac

SEQ ID NO: 3055 - DNA, 25 bp, Homo sapiens
ggccttgactcccttttcagctacc

SEQ ID NO: 3056 - DNA, 25 bp, Homo sapiens
gccttgactcccttttcagctacct

SEQ ID NO: 3057 - DNA, 25 bp, Homo sapiens
ccttgactcccttttcagctacctg

SEQ ID NO: 3058 - DNA, 25 bp, Homo sapiens
cttgactcccttttcagctacctgc

SEQ ID NO: 3059 - DNA, 25 bp, Homo sapiens
ttgactcccttttcagctacctgca

SEQ ID NO: 3060 - DNA, 25 bp, Homo sapiens
tgactcccttttcagctacctgcag

SEQ ID NO: 3061 - DNA, 25 bp, Homo sapiens
gactcccttttcagctacctgcagg

SEQ ID NO: 3062 - DNA, 25 bp, Homo sapiens
actcccttttcagctacctgcagga

SEQ ID NO: 3063 - DNA, 25 bp, Homo sapiens
ctcccttttcagctacctgcaggac

SEQ ID NO: 3064 - DNA, 25 bp, Homo sapiens
tcccttttcagctacctgcaggaca

SEQ ID NO: 3065 - DNA, 25 bp, Homo sapiens
cccttttcagctacctgcaggacaa

SEQ ID NO: 3066 - DNA, 25 bp, Homo sapiens
ccttttcagctacctgcaggacaaa

SEQ ID NO: 3067 - DNA, 25 bp, Homo sapiens
cttttcagctacctgcaggacaaaa

SEQ ID NO: 3068 - DNA, 25 bp, Homo sapiens
ttttcagctacctgcaggacaaaat

SEQ ID NO: 3069 - DNA, 25 bp, Homo sapiens
tttcagctacctgcaggacaaaatt

SEQ ID NO: 3070 - DNA, 25 bp, Homo sapiens
ttcagctacctgcaggacaaaattt

SEQ ID NO: 3071 - DNA, 25 bp, Homo sapiens
tcagctacctgcaggacaaaattta

SEQ ID NO: 3072 - DNA, 25 bp, Homo sapiens
cagctacctgcaggacaaaatttat

SEQ ID NO: 3073 - DNA, 25 bp, Homo sapiens
agctacctgcaggacaaaatttatg

SEQ ID NO: 3074 - DNA, 25 bp, Homo sapiens
gctacctgcaggacaaaatttatga

SEQ ID NO: 3075 - DNA, 25 bp, Homo sapiens
ctacctgcaggacaaaatttatgaa

SEQ ID NO: 3076 - DNA, 25 bp, Homo sapiens
tacctgcaggacaaaatttatgaag

SEQ ID NO: 3077 - DNA, 25 bp, Homo sapiens
acctgcaggacaaaatttatgaagt

SEQ ID NO: 3078 - DNA, 25 bp, Homo sapiens
cctgcaggacaaaatttatgaagtc

SEQ ID NO: 3079 - DNA, 25 bp, Homo sapiens
ctgcaggacaaaatttatgaagtct

SEQ ID NO: 3080 - DNA, 25 bp, Homo sapiens
tgcaggacaaaatttatgaagtctg

SEQ ID NO: 3081 - DNA, 25 bp, Homo sapiens
gcaggacaaaatttatgaagtctga

SEQ ID NO: 3082 - DNA, 25 bp, Homo sapiens
caggacaaaatttatgaagtctgag

SEQ ID NO: 3083 - DNA, 25 bp, Homo sapiens
aggacaaaatttatgaagtctgagg

SEQ ID NO: 3084 - DNA, 25 bp, Homo sapiens
ggacaaaatttatgaagtctgaggg

SEQ ID NO: 3085 - DNA, 25 bp, Homo sapiens
gacaaaatttatgaagtctgagggg

SEQ ID NO: 3086 - DNA, 25 bp, Homo sapiens
acaaaatttatgaagtctgaggggc

SEQ ID NO: 3087 - DNA, 25 bp, Homo sapiens
caaaatttatgaagtctgaggggcc

SEQ ID NO: 3088 - DNA, 25 bp, Homo sapiens
aaaatttatgaagtctgaggggccc

SEQ ID NO: 3089 - DNA, 25 bp, Homo sapiens
aaatttatgaagtctgaggggcccc

SEQ ID NO: 3090 - DNA, 25 bp, Homo sapiens
aatttatgaagtctgaggggcccca

SEQ ID NO: 3091 - DNA, 25 bp, Homo sapiens
atttatgaagtctgaggggccccag

SEQ ID NO: 3092 - DNA, 25 bp, Homo sapiens
tttatgaagtctgaggggccccagc

SEQ ID NO: 3093 - DNA, 25 bp, Homo sapiens
ttatgaagtctgaggggccccagct

SEQ ID NO: 3094 - DNA, 25 bp, Homo sapiens
tatgaagtctgaggggccccagctc

SEQ ID NO: 3095 - DNA, 25 bp, Homo sapiens
atgaagtctgaggggccccagctca

SEQ ID NO: 3096 - DNA, 25 bp, Homo sapiens
tgaagtctgaggggccccagctcac

SEQ ID NO: 3097 - DNA, 25 bp, Homo sapiens
gaagtctgaggggccccagctcacg

SEQ ID NO: 3098 - DNA, 25 bp, Homo sapiens
aagtctgaggggccccagctcacgg

SEQ ID NO: 3099 - DNA, 25 bp, Homo sapiens
agtctgaggggccccagctcacggg

SEQ ID NO: 3100 - DNA, 25 bp, Homo sapiens
gtctgaggggccccagctcacgggc

SEQ ID NO: 3101 - DNA, 25 bp, Homo sapiens
tctgaggggccccagctcacgggcc

SEQ ID NO: 3102 - DNA, 25 bp, Homo sapiens
ctgaggggccccagctcacgggccc

SEQ ID NO: 3103 - DNA, 25 bp, Homo sapiens
tgaggggccccagctcacgggcccc

SEQ ID NO: 3104 - DNA, 25 bp, Homo sapiens
gaggggccccagctcacgggccccc

SEQ ID NO: 3105 - DNA, 25 bp, Homo sapiens
aggggccccagctcacgggccccca

SEQ ID NO: 3106 - DNA, 25 bp, Homo sapiens
ggggccccagctcacgggcccccaa

SEQ ID NO: 3107 - DNA, 25 bp, Homo sapiens
gggccccagctcacgggcccccaac

SEQ ID NO: 3108 - DNA, 25 bp, Homo sapiens
ggccccagctcacgggcccccaact

SEQ ID NO: 3109 - DNA, 25 bp, Homo sapiens
gccccagctcacgggcccccaactt

SEQ ID NO: 3110 - DNA, 25 bp, Homo sapiens
ccccagctcacgggcccccaacttc

SEQ ID NO: 3111 - DNA, 25 bp, Homo sapiens
cccagctcacgggcccccaacttcc

SEQ ID NO: 3112 - DNA, 25 bp, Homo sapiens
ccagctcacgggcccccaacttcca

SEQ ID NO: 3113 - DNA, 25 bp, Homo sapiens
cagctcacgggcccccaacttccag

SEQ ID NO: 3114 - DNA, 25 bp, Homo sapiens
agctcacgggcccccaacttccagc

SEQ ID NO: 3115 - DNA, 25 bp, Homo sapiens
gctcacgggcccccaacttccagct

SEQ ID NO: 3116 - DNA, 25 bp, Homo sapiens
ctcacgggcccccaacttccagctc

SEQ ID NO: 3117 - DNA, 25 bp, Homo sapiens
tcacgggcccccaacttccagctct

SEQ ID NO: 3118 - DNA, 25 bp, Homo sapiens
cacgggcccccaacttccagctctg

SEQ ID NO: 3119 - DNA, 25 bp, Homo sapiens
acgggcccccaacttccagctctgc

SEQ ID NO: 3120 - DNA, 25 bp, Homo sapiens
cgggcccccaacttccagctctgcc

SEQ ID NO: 3121 - DNA, 25 bp, Homo sapiens
gggcccccaacttccagctctgccc

SEQ ID NO: 3122 - DNA, 25 bp, Homo sapiens
ggcccccaacttccagctctgccct

SEQ ID NO: 3123 - DNA, 25 bp, Homo sapiens
gcccccaacttccagctctgccctg

SEQ ID NO: 3124 - DNA, 25 bp, Homo sapiens
cccccaacttccagctctgccctgt

SEQ ID NO: 3125 - DNA, 25 bp, Homo sapiens
ccccaacttccagctctgccctgtg

SEQ ID NO: 3126 - DNA, 25 bp, Homo sapiens
cccaacttccagctctgccctgtgt

SEQ ID NO: 3127 - DNA, 25 bp, Homo sapiens
ccaacttccagctctgccctgtgtt

SEQ ID NO: 3128 - DNA, 25 bp, Homo sapiens
caacttccagctctgccctgtgttt

SEQ ID NO: 3129 - DNA, 25 bp, Homo sapiens
aacttccagctctgccctgtgtttc

SEQ ID NO: 3130 - DNA, 25 bp, Homo sapiens
acttccagctctgccctgtgtttcg

SEQ ID NO: 3131 - DNA, 25 bp, Homo sapiens
cttccagctctgccctgtgtttcgg

SEQ ID NO: 3132 - DNA, 25 bp, Homo sapiens
ttccagctctgccctgtgtttcgga

SEQ ID NO: 3133 - DNA, 25 bp, Homo sapiens
tccagctctgccctgtgtttcggaa

SEQ ID NO: 3134 - DNA, 25 bp, Homo sapiens
ccagctctgccctgtgtttcggaaa

SEQ ID NO: 3135 - DNA, 25 bp, Homo sapiens
cagctctgccctgtgtttcggaaac

SEQ ID NO: 3136 - DNA, 25 bp, Homo sapiens
agctctgccctgtgtttcggaaacc

SEQ ID NO: 3137 - DNA, 25 bp, Homo sapiens
gctctgccctgtgtttcggaaacca

SEQ ID NO: 3138 - DNA, 25 bp, Homo sapiens
ctctgccctgtgtttcggaaaccag

SEQ ID NO: 3139 - DNA, 25 bp, Homo sapiens
tctgccctgtgtttcggaaaccaga

SEQ ID NO: 3140 - DNA, 25 bp, Homo sapiens
ctgccctgtgtttcggaaaccagag

SEQ ID NO: 3141 - DNA, 25 bp, Homo sapiens
tgccctgtgtttcggaaaccagagc

SEQ ID NO: 3142 - DNA, 25 bp, Homo sapiens
gccctgtgtttcggaaaccagagca

SEQ ID NO: 3143 - DNA, 25 bp, Homo sapiens
ccctgtgtttcggaaaccagagcac

SEQ ID NO: 3144 - DNA, 25 bp, Homo sapiens
cctgtgtttcggaaaccagagcaca

SEQ ID NO: 3145 - DNA, 25 bp, Homo sapiens
ctgtgtttcggaaaccagagcacag

SEQ ID NO: 3146 - DNA, 25 bp, Homo sapiens
tgtgtttcggaaaccagagcacagt

SEQ ID NO: 3147 - DNA, 25 bp, Homo sapiens
gtgtttcggaaaccagagcacagtg

SEQ ID NO: 3148 - DNA, 25 bp, Homo sapiens
tgtttcggaaaccagagcacagtgt

SEQ ID NO: 3149 - DNA, 25 bp, Homo sapiens
gtttcggaaaccagagcacagtgtc

SEQ ID NO: 3150 - DNA, 25 bp, Homo sapiens
tttcggaaaccagagcacagtgtct

SEQ ID NO: 3151 - DNA, 25 bp, Homo sapiens
ttcggaaaccagagcacagtgtctg

SEQ ID NO: 3152 - DNA, 25 bp, Homo sapiens
tcggaaaccagagcacagtgtctgc

SEQ ID NO: 3153 - DNA, 25 bp, Homo sapiens
cggaaaccagagcacagtgtctgcc

SEQ ID NO: 3154 - DNA, 25 bp, Homo sapiens
ggaaaccagagcacagtgtctgccc

SEQ ID NO: 3155 - DNA, 25 bp, Homo sapiens
gaaaccagagcacagtgtctgcccc

SEQ ID NO: 3156 - DNA, 25 bp, Homo sapiens
aaaccagagcacagtgtctgccccg

SEQ ID NO: 3157 - DNA, 25 bp, Homo sapiens
aaccagagcacagtgtctgccccgg

SEQ ID NO: 3158 - DNA, 25 bp, Homo sapiens
accagagcacagtgtctgccccggc

SEQ ID NO: 3159 - DNA, 25 bp, Homo sapiens
ccagagcacagtgtctgccccggcc

SEQ ID NO: 3160 - DNA, 25 bp, Homo sapiens
cagagcacagtgtctgccccggcca

SEQ ID NO: 3161 - DNA, 25 bp, Homo sapiens
agagcacagtgtctgccccggccaa

SEQ ID NO: 3162 - DNA, 25 bp, Homo sapiens
gagcacagtgtctgccccggccaag

SEQ ID NO: 3163 - DNA, 25 bp, Homo sapiens
agcacagtgtctgccccggccaagg

SEQ ID NO: 3164 - DNA, 25 bp, Homo sapiens
gcacagtgtctgccccggccaagga

SEQ ID NO: 3165 - DNA, 25 bp, Homo sapiens
cacagtgtctgccccggccaaggag

SEQ ID NO: 3166 - DNA, 25 bp, Homo sapiens
acagtgtctgccccggccaaggagt

SEQ ID NO: 3167 - DNA, 25 bp, Homo sapiens
cagtgtctgccccggccaaggagtt

SEQ ID NO: 3168 - DNA, 25 bp, Homo sapiens
agtgtctgccccggccaaggagttt

SEQ ID NO: 3169 - DNA, 25 bp, Homo sapiens
gtgtctgccccggccaaggagtttg

SEQ ID NO: 3170 - DNA, 25 bp, Homo sapiens
tgtctgccccggccaaggagtttgt

SEQ ID NO: 3171 - DNA, 25 bp, Homo sapiens
gtctgccccggccaaggagtttgtc

SEQ ID NO: 3172 - DNA, 25 bp, Homo sapiens
tctgccccggccaaggagtttgtca

SEQ ID NO: 3173 - DNA, 25 bp, Homo sapiens
ctgccccggccaaggagtttgtcaa

SEQ ID NO: 3174 - DNA, 25 bp, Homo sapiens
tgccccggccaaggagtttgtcaag

SEQ ID NO: 3175 - DNA, 25 bp, Homo sapiens
gccccggccaaggagtttgtcaagg

SEQ ID NO: 3176 - DNA, 25 bp, Homo sapiens
ccccggccaaggagtttgtcaaggt

SEQ ID NO: 3177 - DNA, 25 bp, Homo sapiens
cccggccaaggagtttgtcaaggtg

SEQ ID NO: 3178 - DNA, 25 bp, Homo sapiens
ccggccaaggagtttgtcaaggtgt

SEQ ID NO: 3179 - DNA, 25 bp, Homo sapiens
cggccaaggagtttgtcaaggtgtc

SEQ ID NO: 3180 - DNA, 25 bp, Homo sapiens
ggccaaggagtttgtcaaggtgtct

SEQ ID NO: 3181 - DNA, 25 bp, Homo sapiens
gccaaggagtttgtcaaggtgtctc

SEQ ID NO: 3182 - DNA, 25 bp, Homo sapiens
ccaaggagtttgtcaaggtgtctct

SEQ ID NO: 3183 - DNA, 25 bp, Homo sapiens
caaggagtttgtcaaggtgtctctt

SEQ ID NO: 3184 - DNA, 25 bp, Homo sapiens
aaggagtttgtcaaggtgtctcttt

SEQ ID NO: 3185 - DNA, 25 bp, Homo sapiens
aggagtttgtcaaggtgtctcttta

SEQ ID NO: 3186 - DNA, 25 bp, Homo sapiens
ggagtttgtcaaggtgtctctttat

SEQ ID NO: 3187 - DNA, 25 bp, Homo sapiens
gagtttgtcaaggtgtctctttata

SEQ ID NO: 3188 - DNA, 25 bp, Homo sapiens
agtttgtcaaggtgtctctttatac

SEQ ID NO: 3189 - DNA, 25 bp, Homo sapiens
gtttgtcaaggtgtctctttatacg

SEQ ID NO: 3190 - DNA, 25 bp, Homo sapiens
tttgtcaaggtgtctctttatacgt

SEQ ID NO: 3191 - DNA, 25 bp, Homo sapiens
ttgtcaaggtgtctctttatacgta

SEQ ID NO: 3192 - DNA, 25 bp, Homo sapiens
tgtcaaggtgtctctttatacgtag

SEQ ID NO: 3193 - DNA, 25 bp, Homo sapiens
gtcaaggtgtctctttatacgtagg

SEQ ID NO: 3194 - DNA, 25 bp, Homo sapiens
tcaaggtgtctctttatacgtaggg

SEQ ID NO: 3195 - DNA, 25 bp, Homo sapiens
caaggtgtctctttatacgtagggt

SEQ ID NO: 3196 - DNA, 25 bp, Homo sapiens
aaggtgtctctttatacgtagggtt

SEQ ID NO: 3197 - DNA, 25 bp, Homo sapiens
aggtgtctctttatacgtagggttg

SEQ ID NO: 3198 - DNA, 25 bp, Homo sapiens
ggtgtctctttatacgtagggttgt

SEQ ID NO: 3199 - DNA, 25 bp, Homo sapiens
gtgtctctttatacgtagggttgtg

SEQ ID NO: 3200 - DNA, 25 bp, Homo sapiens
tgtctctttatacgtagggttgtgt

SEQ ID NO: 3201 - DNA, 25 bp, Homo sapiens
gtctctttatacgtagggttgtgtc

SEQ ID NO: 3202 - DNA, 25 bp, Homo sapiens
tctctttatacgtagggttgtgtcc

SEQ ID NO: 3203 - DNA, 25 bp, Homo sapiens
ctctttatacgtagggttgtgtcca

SEQ ID NO: 3204 - DNA, 25 bp, Homo sapiens
tctttatacgtagggttgtgtccat

SEQ ID NO: 3205 - DNA, 25 bp, Homo sapiens
ctttatacgtagggttgtgtccatt

SEQ ID NO: 3206 - DNA, 25 bp, Homo sapiens
tttatacgtagggttgtgtccattt

SEQ ID NO: 3207 - DNA, 25 bp, Homo sapiens
ttatacgtagggttgtgtccatttc

SEQ ID NO: 3208 - DNA, 25 bp, Homo sapiens
tatacgtagggttgtgtccatttcc

SEQ ID NO: 3209 - DNA, 25 bp, Homo sapiens
atacgtagggttgtgtccatttcct

SEQ ID NO: 3210 - DNA, 25 bp, Homo sapiens
tacgtagggttgtgtccatttcctc

SEQ ID NO: 3211 - DNA, 25 bp, Homo sapiens
acgtagggttgtgtccatttcctcg

SEQ ID NO: 3212 - DNA, 25 bp, Homo sapiens
cgtagggttgtgtccatttcctcgt

SEQ ID NO: 3213 - DNA, 25 bp, Homo sapiens
gtagggttgtgtccatttcctcgtg

SEQ ID NO: 3214 - DNA, 25 bp, Homo sapiens
tagggttgtgtccatttcctcgtgt

SEQ ID NO: 3215 - DNA, 25 bp, Homo sapiens
agggttgtgtccatttcctcgtgtc

SEQ ID NO: 3216 - DNA, 25 bp, Homo sapiens
gggttgtgtccatttcctcgtgtcc

SEQ ID NO: 3217 - DNA, 25 bp, Homo sapiens
ggttgtgtccatttcctcgtgtcct

SEQ ID NO: 3218 - DNA, 25 bp, Homo sapiens
gttgtgtccatttcctcgtgtcctt

SEQ ID NO: 3219 - DNA, 25 bp, Homo sapiens
ttgtgtccatttcctcgtgtccttt

SEQ ID NO: 3220 - DNA, 25 bp, Homo sapiens
tgtgtccatttcctcgtgtcctttg

SEQ ID NO: 3221 - DNA, 25 bp, Homo sapiens
gtgtccatttcctcgtgtcctttgg

SEQ ID NO: 3222 - DNA, 25 bp, Homo sapiens
tgtccatttcctcgtgtcctttggt

SEQ ID NO: 3223 - DNA, 25 bp, Homo sapiens
gtccatttcctcgtgtcctttggtt

SEQ ID NO: 3224 - DNA, 25 bp, Homo sapiens
tccatttcctcgtgtcctttggttg

SEQ ID NO: 3225 - DNA, 25 bp, Homo sapiens
ccatttcctcgtgtcctttggttgc

SEQ ID NO: 3226 - DNA, 25 bp, Homo sapiens
catttcctcgtgtcctttggttgct

SEQ ID NO: 3227 - DNA, 25 bp, Homo sapiens
atttcctcgtgtcctttggttgctc

SEQ ID NO: 3228 - DNA, 25 bp, Homo sapiens
tttcctcgtgtcctttggttgctcc

SEQ ID NO: 3229 - DNA, 25 bp, Homo sapiens
ttcctcgtgtcctttggttgctcct

SEQ ID NO: 3230 - DNA, 25 bp, Homo sapiens
tcctcgtgtcctttggttgctcctc

SEQ ID NO: 3231 - DNA, 25 bp, Homo sapiens
cctcgtgtcctttggttgctcctcc

SEQ ID NO: 3232 - DNA, 25 bp, Homo sapiens
ctcgtgtcctttggttgctcctcct

SEQ ID NO: 3233 - DNA, 25 bp, Homo sapiens
tcgtgtcctttggttgctcctcctt

SEQ ID NO: 3234 - DNA, 25 bp, Homo sapiens
cgtgtcctttggttgctcctccttg

SEQ ID NO: 3235 - DNA, 25 bp, Homo sapiens
gtgtcctttggttgctcctccttgg

SEQ ID NO: 3236 - DNA, 25 bp, Homo sapiens
tgtcctttggttgctcctccttggt

SEQ ID NO: 3237 - DNA, 25 bp, Homo sapiens
gtcctttggttgctcctccttggtt

SEQ ID NO: 3238 - DNA, 25 bp, Homo sapiens
tcctttggttgctcctccttggttt

SEQ ID NO: 3239 - DNA, 25 bp, Homo sapiens
cctttggttgctcctccttggtttg

SEQ ID NO: 3240 - DNA, 25 bp, Homo sapiens
ctttggttgctcctccttggtttga

SEQ ID NO: 3241 - DNA, 25 bp, Homo sapiens
tttggttgctcctccttggtttgat

SEQ ID NO: 3242 - DNA, 25 bp, Homo sapiens
ttggttgctcctccttggtttgatt

SEQ ID NO: 3243 - DNA, 25 bp, Homo sapiens
tggttgctcctccttggtttgattt

SEQ ID NO: 3244 - DNA, 25 bp, Homo sapiens
ggttgctcctccttggtttgatttt

SEQ ID NO: 3245 - DNA, 25 bp, Homo sapiens
gttgctcctccttggtttgattttg

SEQ ID NO: 3246 - DNA, 25 bp, Homo sapiens
ttgctcctccttggtttgattttgt

SEQ ID NO: 3247 - DNA, 25 bp, Homo sapiens
tgctcctccttggtttgattttgtg

SEQ ID NO: 3248 - DNA, 25 bp, Homo sapiens
gctcctccttggtttgattttgtgt

SEQ ID NO: 3249 - DNA, 25 bp, Homo sapiens
ctcctccttggtttgattttgtgta

SEQ ID NO: 3250 - DNA, 25 bp, Homo sapiens
tcctccttggtttgattttgtgtaa

SEQ ID NO: 3251 - DNA, 25 bp, Homo sapiens
cctccttggtttgattttgtgtaat

SEQ ID NO: 3252 - DNA, 25 bp, Homo sapiens
ctccttggtttgattttgtgtaatg

SEQ ID NO: 3253 - DNA, 25 bp, Homo sapiens
tccttggtttgattttgtgtaatgg

SEQ ID NO: 3254 - DNA, 25 bp, Homo sapiens
ccttggtttgattttgtgtaatgga

SEQ ID NO: 3255 - DNA, 25 bp, Homo sapiens
cttggtttgattttgtgtaatggat

SEQ ID NO: 3256 - DNA, 25 bp, Homo sapiens
ttggtttgattttgtgtaatggatg

SEQ ID NO: 3257 - DNA, 25 bp, Homo sapiens
tggtttgattttgtgtaatggatgg

SEQ ID NO: 3258 - DNA, 25 bp, Homo sapiens
ggtttgattttgtgtaatggatgga

SEQ ID NO: 3259 - DNA, 25 bp, Homo sapiens
gtttgattttgtgtaatggatggaa

SEQ ID NO: 3260 - DNA, 25 bp, Homo sapiens
tttgattttgtgtaatggatggaaa

SEQ ID NO: 3261 - DNA, 25 bp, Homo sapiens
ttgattttgtgtaatggatggaaaa

SEQ ID NO: 3262 - DNA, 25 bp, Homo sapiens
tgattttgtgtaatggatggaaaac

SEQ ID NO: 3263 - DNA, 25 bp, Homo sapiens
gattttgtgtaatggatggaaaacg

SEQ ID NO: 3264 - DNA, 25 bp, Homo sapiens
attttgtgtaatggatggaaaacgc

SEQ ID NO: 3265 - DNA, 25 bp, Homo sapiens
ttttgtgtaatggatggaaaacgca

SEQ ID NO: 3266 - DNA, 25 bp, Homo sapiens
tttgtgtaatggatggaaaacgcag

SEQ ID NO: 3267 - DNA, 25 bp, Homo sapiens
ttgtgtaatggatggaaaacgcagc

SEQ ID NO: 3268 - DNA, 25 bp, Homo sapiens
tgtgtaatggatggaaaacgcagca

SEQ ID NO: 3269 - DNA, 25 bp, Homo sapiens
gtgtaatggatggaaaacgcagcat

SEQ ID NO: 3270 - DNA, 25 bp, Homo sapiens
tgtaatggatggaaaacgcagcata

SEQ ID NO: 3271 - DNA, 25 bp, Homo sapiens
gtaatggatggaaaacgcagcatac

SEQ ID NO: 3272 - DNA, 25 bp, Homo sapiens
taatggatggaaaacgcagcatact

SEQ ID NO: 3273 - DNA, 25 bp, Homo sapiens
aatggatggaaaacgcagcatactt

SEQ ID NO: 3274 - DNA, 25 bp, Homo sapiens
atggatggaaaacgcagcatacttg

SEQ ID NO: 3275 - DNA, 25 bp, Homo sapiens
tggatggaaaacgcagcatacttgg

SEQ ID NO: 3276 - DNA, 25 bp, Homo sapiens
ggatggaaaacgcagcatacttggc

SEQ ID NO: 3277 - DNA, 25 bp, Homo sapiens
gatggaaaacgcagcatacttggcc

SEQ ID NO: 3278 - DNA, 25 bp, Homo sapiens
atggaaaacgcagcatacttggcct

SEQ ID NO: 3279 - DNA, 25 bp, Homo sapiens
tggaaaacgcagcatacttggcctc

SEQ ID NO: 3280 - DNA, 25 bp, Homo sapiens
ggaaaacgcagcatacttggcctcc

SEQ ID NO: 3281 - DNA, 25 bp, Homo sapiens
gaaaacgcagcatacttggcctccc

SEQ ID NO: 3282 - DNA, 25 bp, Homo sapiens
aaaacgcagcatacttggcctcccc

SEQ ID NO: 3283 - DNA, 25 bp, Homo sapiens
aaacgcagcatacttggcctccccc

SEQ ID NO: 3284 - DNA, 25 bp, Homo sapiens
aacgcagcatacttggcctccccca

SEQ ID NO: 3285 - DNA, 25 bp, Homo sapiens
acgcagcatacttggcctcccccac

SEQ ID NO: 3286 - DNA, 25 bp, Homo sapiens
cgcagcatacttggcctcccccacc

SEQ ID NO: 3287 - DNA, 25 bp, Homo sapiens
gcagcatacttggcctcccccacct

SEQ ID NO: 3288 - DNA, 25 bp, Homo sapiens
cagcatacttggcctcccccacctc

SEQ ID NO: 3289 - DNA, 25 bp, Homo sapiens
agcatacttggcctcccccacctcc

SEQ ID NO: 3290 - DNA, 25 bp, Homo sapiens
gcatacttggcctcccccacctccc

SEQ ID NO: 3291 - DNA, 25 bp, Homo sapiens
catacttggcctcccccacctccct

SEQ ID NO: 3292 - DNA, 25 bp, Homo sapiens
atacttggcctcccccacctccctg

SEQ ID NO: 3293 - DNA, 25 bp, Homo sapiens
tacttggcctcccccacctccctgc

SEQ ID NO: 3294 - DNA, 25 bp, Homo sapiens
acttggcctcccccacctccctgcc

SEQ ID NO: 3295 - DNA, 25 bp, Homo sapiens
cttggcctcccccacctccctgccc

SEQ ID NO: 3296 - DNA, 25 bp, Homo sapiens
ttggcctcccccacctccctgccct

SEQ ID NO: 3297 - DNA, 25 bp, Homo sapiens
tggcctcccccacctccctgccctt

SEQ ID NO: 3298 - DNA, 25 bp, Homo sapiens
ggcctcccccacctccctgcccttc

SEQ ID NO: 3299 - DNA, 25 bp, Homo sapiens
gcctcccccacctccctgcccttcc

SEQ ID NO: 3300 - DNA, 25 bp, Homo sapiens
cctcccccacctccctgcccttcct

SEQ ID NO: 3301 - DNA, 25 bp, Homo sapiens
ctcccccacctccctgcccttcctg

SEQ ID NO: 3302 - DNA, 25 bp, Homo sapiens
tcccccacctccctgcccttcctgg

SEQ ID NO: 3303 - DNA, 25 bp, Homo sapiens
cccccacctccctgcccttcctggc

SEQ ID NO: 3304 - DNA, 25 bp, Homo sapiens
ccccacctccctgcccttcctggcc

SEQ ID NO: 3305 - DNA, 25 bp, Homo sapiens
cccacctccctgcccttcctggcca

SEQ ID NO: 3306 - DNA, 25 bp, Homo sapiens
ccacctccctgcccttcctggccag

SEQ ID NO: 3307 - DNA, 25 bp, Homo sapiens
cacctccctgcccttcctggccaga

SEQ ID NO: 3308 - DNA, 25 bp, Homo sapiens
acctccctgcccttcctggccagag

SEQ ID NO: 3309 - DNA, 20 bp, Homo sapiens
tggaaaggctacgggagcac

SEQ ID NO: 3310 - DNA, 21 bp, Homo sapiens
ggagtcaaggcctttggagga

SEQ ID NO: 3311 - protein, 55 aa, Artificial
  Consensus sequence of the CHROMO motif
EYEVEKILDHREKKKGELEYLVKWKGYSYREDTWEPEENLLNCSKKLDNYKKRER

SEQ ID NO: 3312 - protein, 55 aa, Homo sapiens
LYEVERIVDKRKNKKGKWEYLIRWKGYGSTEDTWEPEHHLLHCEEFIDEFNGLHM

SEQ ID NO: 3313 - protein, 56 aa, Schizosaccharomyces pombe
EYEVERIVDEKLDRNGAVKLYRIRWLNYSSRSDTWEPPENLSGCSAVLAEWKRRKR

SEQ ID NO: 3314 - protein, 53 aa, Mus musculus
EYVVEKVLDRRVVKGKVEYLLKWKGFSDEDNTWEPEENLDCPDLIAEFLQSQK

SEQ ID NO: 3315 - protein, 55 aa, Homo sapiens
EFEVEAIVDKRQDKNGNTQYLVRWKGYDKQDDTWEPEQHLMNCEKCVHDFNRRQT

SEQ ID NO: 3316 - protein, 169 aa, Artificial
  Consensus sequence of ECH motif
AVIKLDRPEAVNALSAELLTELIQALEKLEQDPSVRAVVLTGAPGAFSAGADIKEMAAEFLAQQAQFSLEAQSLWSRLEDLPKPVIAAVNGYALGGGLELALACDYRIAADNAKFGLPETKLGIIPGAGGTQRLPRIIGVSAALEMLLTGRRIRAQEALKMGLVDKVVP

SEQ ID NO: 3317 - protein, 172 aa, Homo sapiens
HILLSSQTSDNNALTPEIMKEVRRALCNAATDDSKLLLLSAVGSVFCSGLDYSYLIGRLSSDRRKESTRIAEAIRDFVKAFIQFKKPIVVAINGPALGLGASILPLCDIVWASEKAWFQTPYATIRLTPAGCSSYTFPQILGVALANEMLFCGRKLTAQEACSRGLVSQVFW

SEQ ID NO: 3318 - protein, 167 aa, Rattus norvegicus
GLIQLNRPKALNALCNGLIEELNQALETFEEDPAVGAIVLTGGEKAFAAGADIKEMQNRTFQDCYSGKFLSHWDHITRIKKPVIAAVNGYALGGGCELAMMCDIIYAGEKAQFGQPEILLGTIPGAGGTQRLTRAVGKSLAMEMVLTGDRISAQDAKQAGLVSKIFP

SEQ ID NO: 3319 - protein, 167 aa, Caenorhabditis elegans
ALIKLNRPKALNALCAQLMTELADALEVLDTDKSVGAIVITGSERAFAAGADIKEMTNNEFATTFSGSFLSNWTAVSDVKKPVIAAVNGFALGGGNELAMMCDIIYAGEKARFGQPEINIGTIPGAGGTQRWARAAGKSFAMEVCLTGNHVTAQEAKEHGIVSKIFP

SEQ ID NO: 3320 - protein, 167 aa, Rhodobacter capsulatus
AVITLDRPEVMNALNAAMRHELTAALHRARGEARAIVLTGSGRAFCSGQDLGDGAAEGLNLETVLREEYEPLLQAIYSCPLPVLAAVNGAAAGAGANLALAADVVIAAQSAAFMQAFTRIGLMPDAGGTWWLPRQVGMARAMGMALFAEKIGAEEAARMGLIWEAVP
